United States Patent Application Publication US 2026/0191916 A1 - sequence listing, part 105

SEQ ID NO: 667 - DNA, 3377918 bp, Faecalibacterium prausnitzii (residues 1-1,688,959 of 3,377,918)
  source 1..3377918: mol_type = genomic DNA
tgatggaagccgccgtacagaccgcagcggatgctgaaaagtggattgccctaatgaaacagtatgtcaaccctgtggagctgaccgccgaacttctgaacactctaattgaaaaaataaccgtccacgaagctgtcaagggcgaggatggaagccgtgagcaggaagtagaaatctactaccgcttcatcggcaaaatcgactgacctttctttttttacccaacaatatctttaattaagggaaacgggcacctcggagccgaacacctctaatctgatggcactggcaaggctgtacggcatcccggcagaggatctgctcaagggcgtggaaagcgcattggaagcacaggaaaaatgattacaactccccctgcatctccaccatatccgcccagaagcgcttggggcaatgggtcatgcggcctttttcgttgtggcgcgccttgatttccagcgttttgtagaactgcgtccacagcgcctgaaactgctgttcccgcgcactgggcggcggcagctccaagggcgctgccagctccatcagccgggtgctgcgcccctcgtgcagcagcaccgcctgatggacggcatcgtagatcatgaagtcctcctccggaaagcgtccgcagaagtgcgggcgcagcagggggaggatataatttttggggtggatgaccgcgcccagcatcccgtcatgctcttcgaaccgcacaaagccctgaaacttgtctacctcccagtccagactttttttcatggcgtagaggggcgcgaccaccggatgtccctcccgcttgaccgtgcccgggcccagcgcaaaagccagatgcagaaaccggagcaacagcagctccttgtcctcctgcccggagagaaaatcccggctgacaaggtactcggtctctgcgcccagctttttgccaaagctggcgaatacccgccgggcaacggcggggtcggtggcaatctccttgaccgggtatagggtggcggtctcccgctggggcgtccacaccgcaaagggaagctcgtgctgggcaaagctttcgtacacgcagcacagaaagcccacaaagctgccgtcgtacaggtagactacatcggcatcgtgcagcttgcgcgcccccttggggcttacagcgccttggcaagacattgcacggcctcctctcgtaccattcggacagccgcccggggcggcacgccctgcccgatgaggttgtccacggcgggcgggctgaacaggctcagctgctcacagctgccgctgaatacgttggggtcgatgagcgcccgggtaatgcgctcccgcccggcactgccgcgccccgggtgcgccccggaaaagccccggcaggtgataaaatactgcgcccgcttgagcaccacgcccatgcgcttgagctcgtccagacccagcgccgcctgcttgcgggcgcgccagatgcgccgggcactttttgggccgatgcccggcacccgcagcagcatctcgaagggagcgcggttcacgtccaccgggaacagcccgtagtgctgcaccgcccagttgcatttggggtccagataggggttgaagttggggttgtccttatctaaaatctcgtccgcctcgaactggtagaaccgcagcagccagtcggcctgatacagccggtgctcccgcagaaggggcggctttgtgttcagtgcgggcaggcgggtgtcctcggctaccgggatgtaagcggagtagaacacccgcttcagcccgtatttctggtacatcccctcggtcagctttaaaatgtggtagtccgtctccggcgaagcgcctacgatcatctgggtgctctgcccggcgggggcgaatttgggcgcgtggcggtagagggtaagctcctcccggctggcagcgccggacaccgcgatctgcttcatggggcggaagatggagtgccgccctttgtccggggccagcaggttcaggctgcgctcactgggcagctccacgttcacgctcagacggtcggccagataccccagctgctgcaaaagctccgggcttgtgcccgggatggccttggcgtggatgtagcccccaaagcggtattcgccccgcagcagccgcagcaccgccagcatccgctcggtggtgtagtccggggtgcccagcaccgcgctggacaaaaacagcccctcgatgtagttgcggcggtagaactccatggtcagttctgccagttcccggggcgcaaaggtggcgcgggggatatcgttggagcggcggttgacgcagtagccgcagtcgaaggagcagcagttggacatgagcaccttgagcaggctgacgcagcggccatcggcggtaaaggcgtggcagcagcccggggcatagcagctgcctaccgtgcccgggcgcgcggtgcgggacgctccgctggaggtgcaggcaacgtcatatttggcgctgtccgccagaatagtcagcttgtccatcagggtctgttccatgcaaaaaacacctccaaagaggataaaatcgggaaaaagggtcaaaaaataaagccatacgcaaaacagcagatggctttatgaaaaacaggggacgtctgaccgcgaaccctctcagtcatcgcgtagcgatgactgagagggttccgcttaccacttggctttggtctccaccacgcggcctgcaatgtgcaggtggttcaggtcctcgcccttgatgaccatctcatgataggcggggttgaaaggctgcaataccacgcagttgccgcgctggatgtagcgcttcaaagtgccctcgccctcgtcgccgtagatcagcacgcccaggtcgccgttttccagcgtgtcctgcttgtgcaccagcgcaaggtcgccgtcctgaatgcggggctccatgctgtcgccgcgcaccaccagataaaaatagttggcggggtccttcacccgggcgtactcctgcccgtagtcctcttcaaaggccagtgcgccgtagccggccttcactgtgccgatgaccgggatcaggctctcggtgtagctgccgaaaaagcgctcctcgggggcagaaacattgctgaccggacggtacagccccagcagatagtctgccgtggtgttcagcagctccgcaatgcgggccacagtggaggggtcgggggaggacttgccgctttcccacttgccgacagcctgctgggtgacccccagtctggcggcaagctccgcttggctgacgccctgctttttgcggcactccttcaatagctctgaaaacgacataatgatgctccttttcccgatgggtggtttatgttggttttattatacaacaaaaaggtgtttctgtaaagagaaaatccaaaaaaacttcgaataaaggttgtggtaaatggggctgctgtgcagctatcgtacagaaaaaagaaaaaatttgcataagggcttgacagaacagcgtaaatctggtaaagtaaataggcattcgacacggcgtaacgcgagtgtccacaaggagagatgtccgagtggtttaaggaagcagtcttgaaaactgccgtacggcaacgtaccgtgggttcgaatcccactctctccgccattttttattgaataagtgtaatgcactttgctctggagtagtactcaagaggccgaagaggcgcccctgctaagggcgtaggtcgtctaaacaacggcgcgagggttcaaatccctcctactccgccaagaaaatccctcgtagtttcgtgaaagctgcgtgggattttccttttggcgggggaaactccctcagtcaaaacctgacggttttgacagctccctcggggagggagcctttggcatggcggtacagtttgcggctcaagcgcaaagcttgcgggcgtgcccgctcccccttgggggagctgtcgcgcagcgactgaggggctataaatggagaagcgaaaaaagcgttaaagcgatagcgccgactggcgcagcgctagcttttttgtgcttcgacttcttctttaggattgtcaagggcgtgcagcccttggcccgttgcggggtgggtggagtccagaggtagggaggggggagtcggaacacccctccctgcctctggcccagcggagcgtctttgcacgcttgcggcaagcagaaagctgccatagcagcaacgctgcaaatgccgtttcccattacgacccttccataaataatacaatgccggacagcccacggactgtccggcattgcgctatttatcggtaaaattacagcagcaggttcgtgatgcctgccagcaccagcaggtgcaccgggtagaaccagtaaaaggccttcttttgcagcggactgcacgcgccgcgctgcccgttgtagaaccagaccagtacaaaggccagcggtgcggtgagctcgaacataaacagcagcgcgcctgcaaggcactgccgcttgcggtctgcacgggtgaggtacagcgcgcagatgatgatcacgccgatggcgttgtagtcggtattggcagccagcgccagcgcggcgcacccgcccgcccacacaaacccctgccagccgggcaggccgttttccttttcaaagcgcttgagtcctgccatagccagcacgcccagcgccagcgtccagtaaacgttctgcgcactggggtcaaaggaggtgcgaaagaacgcaaggtcaaagggtacttcgctcagaaggccgaacagcaccagccgccccaaatagcctttgacgttgtgggtgtgcacaaagccctccaccagcaaaaagcagaacaggggaaaggccagccgtccggtgaagcgcagcaccatgtccagccggtaaagcggataggcagaaagggtgtcctgcgagagggtgccggcgtccagcccgggcgtaaggatacctgcctcgatgcaggacgcgccgatgtggtccaccagcatggtaatgcaggcaatggttttcagagcagtgccgctgaaagtgcggcgcggggaaagtgcggtcataaaaacacctcggtcagtttgtaaaaaatcgttataaaaactataacggaggaaggacggcatttcctgcaaaaatcgcggcaaaatccgcacagagcgtgcaaaaatcggggcaaaatgcttgacagaaaaggcgcgggatagtacaatcaagaagataattgaactgactcaaacgaaagatgaaaaagattcacaaagaatcgggcgtctccgaaccagtaaagacggaaggaggctttgggcatgacgctattttcttacgaaatttttgatgccgtggcccggcagggcagctttaacaaggcggcacagcagctgcacctgaccccctcggccatcagtcacgccattgccgtaatggaggaggagctgggttttgctctgttcaaccgcggcaaaaacggcgtgtccatgaccagctacggcgcttccctatacccctctatccgcgatgtgctcaacagtgacgaggcgctgaagcagagcatcgcccgcctgaacggcttggaaaagggcaaggtgaagctgggcgtattcaactcggtgtgcgcatcgctgctgcccgggctgctgaaaagctttgcagcgcattatccgcagatcgagatcgaagtatatcagggcacctacgatgatgtcaaggaatggctgcgcaccggtcaggtggacatcgccttcctgtcctccacctgccgggaggagttcaacctcaccgagctgttccgggagccgctgctgtgcatcgtgccgcaggactggccggagccgcaggacggcgtaatgaccccggcgctgatgaacggccagagctttgtagtgcagtgcgacgccaccgatgccgagatgcgccagttcctcaagaaatacaagatcggcaccgagcgccgctgccatgtcatcgacgaccagtccaacatcgccatggtggaagccgggcttggcatctccatcatgccgcagatgctgctgcgggactgcaaggccgccgtcaaggtgtaccccatcgagccggaggagtaccgcgtggtgggcttggccgtgcagcgcccggcgtctatggctcccgccgtggagcagatgttccaccatatcgtggagtactgccacgagctggatctttcgctgtaaataattataatgtcggaaaaccggagcgtttgcaaacgctccggttttccgtttttataggaacttgttctccgacagcgtcctcgccctctccgtcacggcttacgccgtgccacctctcccaaagggagaggccttggcatggcggcaaagttgccggttaaattgcgaagtatacggtttcgccagaggctctccctttgaggaaagacttcccccgctccgggggaagatgtcaccgcaggtgacaaaagggggaatctggcgcgttagcgcctgagagggcgaggacgctaaccgcagtgccgcccaaggcacgatgcggatgctgggtgccgcaacccgatagcggagggtattccaaatcgtcccgtctgccgccgcaagtaaaaattgcatccggcggcaaaaaggattatactataaaaaatgtctgcggtgcacaggccgcaggggcagaggagatgaagcatgaaacgacgggacttttgtaagggtcttgcggtgacccttgcggcgggggcactggctcccggagcggcgctgccgcaggccggggcggctacggcgctggtcggccgcgccgtgccggacgactactataccctgtggtaccgtagcgaccgctgcagcgctgatctgcggcacgattactattacagcgacagcctgttcgaccacgccgccacagagtacgacgataagctggcactggccaccttgggcatggctgcggctgcggatagctcgtgggagagcgaccagtactattggatgacgggcgaggtcggccgtgccgcccatatccgggatgcctttgcaaagctgggctttgccgaggtgcagctgttcaactatacccacagcctgaacgatgccccggatacggcggcctgtgccgttgcccgcaaaacactggtgcgcggcggcagacaggtgaccatcatcggggcgttcgtgcgcggctccggttatggagccgagtggtccggcaaccttcatgcaggctccggcagcgcccacacgggttttgtagcagcggcgcggcagctgactgaaaaaatacgcggatatgttcaggcatcggccaagcgccagccgctgggtaccctgaagctctggatgggcggctacagccgtgccggcggcgtaacgaatttagtggcggcgcgtctgcccgccttgctgccgcagctggaaaagaaaaacaccttcgtctatacctttgccgccccggctgcgctggcggcggcagactgccccgagctgcagcaggactttgacaacaaccatacggcaagcggcagtctgaaaaagaactggggcaccagcaacatcttcaacatcatctccagcggagatgtggtcccccgggtgctgcccgcagagtggggcttctaccgcaacggcaacgaccgttttctgcccgctacagttgtcccggaggaactgcaggcgctgaacgaccgcagcgcagggatggagggcgcaccgctggatttcgggcggctggccgtcaccgaggagaccgatgccgtgctgcagtccatgatgaccctgttcggcagccgtcagacctatcacgaggactacgaggatgccatgcgctgtatactgcaatgcgtgaccacccgctcggaagcagaggtgacccggggcgtcattctggacgatgctgccgtggtggcgcagctgcgcagtatggagcccatgcagcagttcccgcaggaaaaggtggagcgctgtgtgcaggcggcctccgccctgagccgcccgctgctggaaaagctgggcaatgcagtgccgctgcaggcacagcagatcgtgatccccatgctggcagtcggtctgtgctttgaattggacccggagacgctgcagctggtgtcagactttgtattgtccaccatcacggtaaaggggcagctgagcggcatcctgaaaacagtgctgtgtcactttttggaaacctacattaccctgctggaatactatgaccctgccgaccacggcatggagccctatacccggcaggaagagctataagcaaaaggccgctgcgcagacatcgcgcagcggccttggctttttacagataagatcagaacttgaacaggttcagcccggtaacggggtcgtactggcggtctactgtgccgtccagaacatccaccaccatctcacaggtggcgctgaccaccgcccggttcagatgtccgccgaacacctcgcccttgtcgttgccggcgctcatgtgcaggtgggtgtagaatgcgccgttcatggtgttgatggtgccggtcagggacacgatctcaaaactgccgctgaaggtgttggcgtagtatttcttctctgctacattgtatacgcccaccgtaaagctgttggtggcgcccagcgcctgcacggcggcaaggcggatgttttccttcagggcaagctctttgacctgttcaaggatctcttcgtccttgtcgatgcgtacaatgatcttattgccaaaacgtttgtattccatggggaagcatctcctttatgtgtgtgcgcgctgccctttgcccggaacgcgtgcgataagctgatatttatcgcataaaaaactcatttaatactatacctaattttctcggagcatctatatttatttcgtgtcctgcattctgaataacattaaattgtgcattaggtatcaattctttaagctgtaaagaagccttcatattggctttatctctttcaccacaaataacaaggacagaagaatctattttgtgtaaatcctgttgaaaattcaaattcatcattgaactggaaagatttataacctctttcttctcaagtcccattttcttaaatgcactgttcggcataatatgaaagattgcattttgaaatttcaacatttttttaggcatagcgtactgcgtcccgataagtaccacagaattgactctatctggattttcaatcagatactgtaatgcgagaatcccccctaacgacaaaccacatatattaagtggtttagagtatgttttacaatattcagaaaacacttgataaagattagaataattgacttctcgtccttgaaggagcgtgaataaattcggacaatctatatctaagttatcatccattacatcaatagttttttcccaactggaggaagtttgtcccaaaccatgtagaaaaatatacttcatgataaattttacctttccttcaaattccgatttgttgaactaaatcgagtataccacacccgccaaggaaagaacaccccgatagcgtaaaatttgcaggtggaaacttgtcggggcggggacttggcaaacccggcgtgattgcgctataatagagccgtaacagttccacaaaggtgtggtaagggaggtgcggtcatgatccgggtggcggtcgtagaggatgacgcggaggtgcagggggtattgcaggagtacatccggcggtatacccggcagtacgggacagaatttgaggtatcggtctttgcggacggggtggacattctggacaattaccgcgccgtctacgatattatttttctggatgtggagatgaagcatctggacggcatgaccacggcagagcgcatccggcagatggatgcagacgtcatcctgatcttcattaccaatatggcgcagtatgccatccggggctactcggtgggggcgctggactatgtgctgaagccggtgccgtattttgcattttccgagcagctgaaaaaggccgagaaaaatttggcccgccgcgccagccactatctcatggtcccggtggagagcggcctgcggcggctggacagctcccggctgtattatctggaaagcgaaggccaccgggtgcattactacaccgaggacggcgatttttcggcaccgggcaccctcaaggcagtggaggaaaagctggcgggccgcccctttgcccgctgcaacagcggctatctggtaaatctggcgcaggtgcaggcggtgcagcagaacacggtgcaggtgggaccctatgagctgcagatcagccgccccaagcgcaaggcctttcttgccgcactgaccgactacatcggaggtgagggctcatgaccatgctgccgaacatcccccgcctgtacacggcgctggcagaggtgttggcggtgctgctctacgcccgccacctgccgcggcggttccaccggcagaccgtggtcacggtggtgtgggcactggtgctgggaatctttttgcacaagaccggctatgtgccgctggcgtggtgggtgccctgtatgctctgcgcggtgctgctgctctacgggtacctgtggggcagccgggcggtcaactggctggaggcactgtacatcaccgcccgggcgtttctgctggcagagtttgctgccagcgcagaatggcagctgcactgctggctgttcccgcaccggagcggctttgacccgctggcgctggcgctgctggcggcggtctacggcgcggtctacggcctgatgttctggctggagcgcagccgtccgctgcccgaaaagcatctggacatcagcaacaaggctgcgctggcggcatttgtcatggcgggcacggtgttcgtggtcagcaaccttctgtttctgggggagagcccggcgaccatgaacgtgttctgcatccgcacgctggtggatttctgcggggtgctgatcctgacgctgcagcacgagcaactacgggagagcgcgctgcatcaggagctttctgccatggacaatgtgctgcaccggcagtatgaacagtacaagcgcagcaaggagggtatcgagctcatcaacagccgctaccatgaattgaaggtccagatcgctgatatccgtgcccagcgggaccgcgccaagcaggacgcggcgctggcaaagatggagaacagcattctgcagtatgaggcggagaacaagaccggaaacccggtgctggacatcctactcaccgccaagagcatggaatgtcaggaaaagcagatccgcatgaccagcgtggcagacgggcatctgctggatcatctgtccacccgggagatctgcacgctggtgggcaccgcgctggacaacgccattgaaagctgcgccgccgagcaggacccggaaaagcggctgatccgcacggcggtgtatgcccagaacggctttgtgctgttccgggtggagaactactgcaaaaagccggtggaactgggtgcagacggtctgccgctgcgcagtgcccacggcggttacgacctgcgcagcctgcgggcggctgcgcagcagcacagcggcagcatgaccgtgcactgggaggacggctggttcaccctgcgggtgcttctgccgcaggcggggattcaacagaccgagggcggggagtgatccccgccctttttgcaatatgcacaaaatcaggggcagtggaattgtgaataagcacaataaaaaatgaaaccaatttgaaacttttttcaaattatgcatccaaaacgacagattgtgcggattttaaactctaaaagcggatgtttgctataatgctgacaacgaacacgaaacctgcaaatacagagatatgatttgcatggtaatatcaaaggaggacaatacttatgggcaaaatttcaagacgtactttcttgaaagcagctacttctaccgcagcgctggcagcaggcgtatccattacgggaacggctgcggcagaagcgaatgcttccaaggtacacggctttttgagtacttcgccgaccaaaatcacagattcgggcaatgcagatacacaatattttaaaagtgcttatgcttcctgtgaagaagtttacgaagcaaatctggaaaccaataaaaatattcaggaggaaggttctgtcctgctgaaaaatgatggcactctcccgctggcaaagggtgcacgcatcagtgtattctcccgttcctgtgcagatatcgtatatggcggtaccggttctggctccattgatacggcggttgttgtggatctgcacacggccctgaccgaagcaggctttgcgctgaatgagacgctgtgggatttttacgcaggccaggcggcggattacacgcgcacgacctctgatgtggcagaagttccgctttccaaatataccgatgcagtaaagacgtcttacgcagattatgccgatgcggcggtcgtagtgatttcccgcactggcggcgagggtgatgacctgcatccggaagtgagctatctggatctgcagccggatgaacgcgaaatgctggcccatgtcaaggaaaacttttccaaaatcgttgttctgctgaacagctccaacccgctgtgccttggctggttggaagaatacggtgtgaacgcctgtctgtggatcggcggccccggacagactggtctgactgccgtggcagaaatgctggtgggtgaccgtgtgccttccggcaagctggctgatacatatgcagccagtgcagactctgcacctgcagcacagaactttggcgagttttgctatatcaatgcggtgggacagccagcagaaatggatacgcagtattttgatctgacaaatagtacaggcgcagtttctaccattcccaattcgggctactacatcgtggaagcagaaggcatttatgtgggttatgcttattatgaaacccgctatgaagattgtgtgctgggccgcggcaatgccagcagcaccgctggcacatactgctccgatggcaattggaactatagtcaggaagtctgcttcccgtttggttttggcctttcctatacgactttctcgcagagtctggacagtgtgcaggtgaatggtgacaccgttacggtgaccgcaactgttaaaaataccggcagctgtgcgggcaaagatgttgtggaaatctatgcacaggctccttataccgtgggcggcattgaaaaagcggctgtgcagctgtgcggctatgcaaagacggaaaaactggaaccgggcaagtctcagacgctgacggtagaagttgatttgcacgatgttgcaagttatgaccagaacgaccggcaggcatatgttctggaagcaggcacttattatttcgccattggcaatggtgcccatgctgccttgaacaatattctggcagcaaagggctacacggtggctgatggtatggatgcagagggcgatgcaaaactgtgcagcgcagtggaactggatgaaacggtttacaacaccgatccggtttccggcgcagagatccacaacctgtttgaagaggtggatctgaactactaccagccgaataaggtaacatacctgtctcgatccgattggaagggcacatggccggtttcttatacagaagtggaagcaacggatgacatgatccgcgatctgcagaataactatactgcgaatgaaacggatattaccaagatcacctataacgcaaataacggtttgacactggctgcaatgatcggtctggactatgaggatgccaagtgggatgacctgctggatcagatgagtctggaagagcaggtagaactggtacaggctggtgcaagccagacagcagctgtttcctccattgcatttgcgggtacagtggatgcagatggccctgcgggtctgggtagtatgactggccgccgctattattatgagaccatcggagatacttcaagtgttaccacaatgagcgcgatcggttacaactcggctgtcgtgatcgcttctacatggagtcaggacgctgcatgggcacgtggtcaggccattggtgaagatggcctgtggacgaatacggtcggctggtggggccctggtgcaaacacccatcgctctccgtactgcggacgcaactttgagtattactcggaagatccgttccttggcggcaccattggcgcacaggatattgcaggcgcacaggcaaagggtatgcgtgcattctgcaaacatttcgtggccaatgatcaggaactgcatcgtcatggcctgtctacatttgcaaacgagcaggcactgcgccagatctatctgaaacagttccagtatgttgttcagcgcggtggtacgctgtctctgatggaatcgttcaaccgtattggctgcaagtggacgggcggtgattatgcgctgtgcacagagctgctgcgcggtgaatggggtttcaagggaagtgttctgaccgacttcaatttcttcgcagatgacagctggatgaacattcgttccggtctggcgggcggtacggaccagtggctggcccttggcaccagcaatctgttgaactttgccaagcaggatattgcacttgcagcagaggttcgtcaggcaagccaccgtgttctttatgcagttgcgcagtctgcaggtatgaatggactgagtgaaacggcaaagatcgaaaaagtgactgcatggtgggaaaaggctctgtacgggatgtgtgcaggctttggtgtcctgaccgttgcaggtctggcatggatgacaaaagaggaactctctccgaaggaaacagcttcggcgaccaaaaaggaggaacagtaatatgctgaataccaaaaattggggcagaggcgcttatctgatgctggcaggtgatgtgtgcgcagttctttctctgatcggctgcttctggctgggcattggcctttcggcggcatcactttgtctggtgctgggcattacagcatcgttccttgcaatcaaaaccggacgagacattctggcatatcccagttatctgctgtatattgcagcgttcggttttgcaatttgtgcagaactgtataccatctcgaatgtgctggttgccattgacgcttctacgttcccggtcaatcttctttataccggtgtaacgatgctggcaacgatcatcgtaagctttgcggcaactgttgcaaaacagaagaaggtcaaggcataagcactaactgataaactgacccgttctttcttctaacctcggaacacggctgcatggcagttacgacctgcagccgtgttcccttttggaaacagaatcacgcttcttctccttatgcgtggtcctgtttccaaaggcaataccgtttctactgaaaggagatttccccgtgaaacatcaggatattattgcaaaactgagtctggaacaaaaatgcgccctgctgagcggcggcacggtgttcaccacccgggcgctgccgggcaagggcatcccggccattaccctgtcggacggccccaacggcgtgcgcaagcaggcgggcgcggccgaccatctgggtctgaaccccagtgtgcccgccacctgcttccccacctcggccaccgttgccaacagctgggacccggcactgggcgaggctgtgggcgcagccatgggcgaagaagcagcggcacagggcgtgtcggtgctgctgggccccggcctgaacattaagcgcagcccgctgtgcggccgcaacttcgagtatttctcggaggacccctaccttgccggtaagatggcggcggcctacgtccgcggcatccagaaaaacggcattgccgcctgtcccaagcactttgcggtgaacagtcaggagctgcgccgcatggcctcggattccatcgtggacgagcgcaccctgcgggaaatttacctgaccggcttcgagatggtggtcaaggaagcgcagcctaagaccatcatgtccgcctataaccttgtcaacggcacctacgccaacgagaacacccacctgctcatggatatcctgcgcagggactggggctttgacggcgcagtggtcaccgactggggcggcagcaacgaccacgcccttggcgtaaagaacggatctacgctggaaatgcccgcccccggcggggacgccatccgggagctgatgaaggcagtgcagactggcaagatcaccgaagcagacgtggacgcccggctggacgaactgctggagctggtgttcaccaccaaggcggcggtggacgccgcacccggcaagttcgatgccgacgcccaccacgcactggcacgccgggctgctgcccagagcatcgtgctgctgaagaacgaaaacagcctgctgccccttgcaaagggggaaaaggtggcggtcatcggcgactttgctcagacgccccgctatcagggtgcaggctccagtgctgtcaactccatcaaggtggattcctttctggaatgccttgccgagagcggcctgaacagcatcggctacgccaagggctttgaccggcagggcaagcccgatgaggtgctgaaagccgaagcggtgcagctggcaaagaacgccaatgtggtgctgctgtgcatgggtctggacgagatcaaagagagcgagggcatcgaccgcgccgacatgaagctggcagagaaccagctggaactgctggcggctgtggcggcggcaaaccccaatgtggttgtgctgctgagcgcgggctcctcgctggaaagcggttgggtcaaggactgcaaggcgctggtctacggctgcttgggcggtcaggccggtgcgggcgcactggtcgaggtgctcaccggtgcgcagaacccctgcggcaagctggcggagacttgggcgcgcagctacgccgacacccccgcaaaggcgcatttcggcggcgacggtcccactgtggagtaccgcgaggggctgtatgtgggctaccgctactacgacactgccggtgtgcacaccgccttccccttcggctacggcctgagctataccagctttgcgtacagtgacctgaaagcagacgaaaagggcgtgaccctgactgtcaccaacaccggcagctgtgcaggtgccgaggtggtgcagctgtatgtggcaaagccggatgcaacgattttccgccccgctaaggagctgaagggctttaccaaggtgcagctggaagccggagagagcaagaccgtcaccatcccgctggacgataaggcgttccgctactggaacgtcaagaccgaccgctgggaggtggaaggcggcagctatcagctgctggtgggcgcttccagcgccgatatccgtctgactgccgccgtcacggtggcgggcaccggcgcacccgacccctatgcgggcaaagaccttgcccattaccgcaccgcacaggtgcagaatgtgccggacgcggagtttgaagcgctgctgggccgtcccatcccggagaacaaggtgcacatcgaccgcaacatgacgctgggcgagatgggacacggacgcagccccatcggctggctggcagcggcggtactgggtaccctgctgcgccgcagcatcaaaaagggcaagcctgacctgaacatcctgttccagtacaatatgcccctgcgggcgctggccaaaatgaccaacggcgccatcagcatgggcatggtggacggcattgtgatggagctgcagggcttctggatcatcggccttgtgcgggtgatcgtggagaccgtgaagaacatcgtgctgaacagccgcatggaagagcgcctgaaaaacagctgaaaggaagcaggctatgaatttctggaataactttgcggcaaagcaccccgccgctgccaagtgggtgcgcgagggcggcctgttcgtcatcgtgtccaacctcatcaccgtgttcaagtacctgctgctgcaatttctgcccaaggcctttgcaagcctgccggtggtggatttcggctggccgggcattgatatcaccctgttcggcgagaccttcaagtggaacatcctcggctacgatgccgcccacggcggcttgccctacttctgcgcctacatgatcgccatggtcatcggcgagtgcatcaatttccccatccagcgtaattttgtgttccgcagcaagggcaatctggcaaagcagatcggctggtatgtgctggcgttctgcgtcatcacctgcatcgtcaactccatcaactgcatctgggtggcggtggcaggtctgctggtgccggacttcatctacaacatcggcactacggtgctgaacggcggcatctccatggtcatcttcttcttcgtgaataagatcatcttcccggagggcgaaaaagccgccaaataacaagtcattctccttcattttcttcttttcatcacaaaggctctcgcccgctctgtgcatacgacagaacaggtgggagcctttggcttatgatcatcctatcgcacaaaaggcaggataccatcgtaatgatgataccctgcctttgctcgttccggtcctcgtcctgtgacctccgccacaaaaaaacagaccgaatggtctggcggcatctttcttggtagacattcctacgcgttgggaaccgcgcactaatcaaagccctgctagggctttgattgccccgcctgcggcgcggccgtgctgttcgagccctgtaccgtcctgctctgacgcaggttagtggatgacgcaacaaaaaagcccctgaccgaagtcagggactcttgttttggtggagcattgtccacagcactcgaacccaacacttcctcacgggtgaccgtcttggcatcgtccgtgaagttgaagttgagtacgacccggtcatcaaagacgtagaccgagttgacaaaggtatctatgatctgccgctggtgttccgtgctgcccacgtcacccttgcggaatttttcaatccagaaccgaatccactcacgggtcaggacgggctttttcagctcttcttccagaatgctggtgttcagggcttctttccgggcttccagctcgtccaaccgctgcttggtggtcggggtcaggatgccctgttcaatggcttccagaaggtttgcgagtcgtttctctgtatcccggagctgctctttcagaacaggcagccgggtgttctcctgctgctgggcttccatgaccaaatctatcagccgttcgatgatttcatcgctgaaaatcaccttaatggcggtgtccaccacgaaccgttccagcggctccttgcggatagccttcaggtcacagtgcgccttgccgtggcgcttggcgttgccgcacttgtagtaatagtaggtgtttcccatgtggctggtgccgctttcgccgcccatcagggtgccgcacttgccgcagaacagcttggtggtcagcagatagctcacatcctcttttgcgggtcgaccatgggcaatcctattttgctcgaaacgctgctgcacccggtcgaacaagtcctcgtccacgatggccggaatgccgcccggtgtcacgatgtccttatatcggtattcacctatgtaacggcggttccggaaaatctggaagaagctgttcttgacaaaaggcttgccggtacgggtgcgcagccctcgctcgttcagggatgctgcgattttctcggcaggctcgccgttggcgtaccgggtaaaaatctcctgcacgatgggagccgtttccgggtcgatatggtacagcctgtcctccttgccgatggtgaagcccaacggcaccacaccgccgttgtacttgcactggagggcattttcgcgctcaccgcgcgccactttcagggcaagctcggcggaatagtattccgccatgccgatcagcatactctccaccataatgccttcaggcccttgcgagatgggttccatggcagacaccagatggacaccgttcttttccagctggtacttgtagttcacggcatcgtagcggttccgggcaaagcggtccagcttccagaccagaaccacatcgaagattttctttccgctgtccttgatcatccgctgaaagtctgggcggtcatccgttttggcagagtaggcacggtcaatgtaggtgccgaccacggtgatgccgttcttctcggcgtaggccttgcagtcgcgcaactgtccctcaatggacgcttctcgctggctgtcggatgaatagcgggcgtagattacggcggtcatggttgcacctccttggcgtgtattcgacttacctttatagtatcgggtcaagcgcagcttgtcaacaatctgcgagcagagtgaaatgcgaaaattgcgaaacgcagcgaaaaaggtgagagcaagaatcgtcccgtggccacaaattttcaattcttgaaaattcttgcccctttgggacagcttcttgttggggcgtgcctgccccaaaccctgctggaacgagtacggcaaactggaatttgactaatcctacatgtgcatcatattacactcatgtaattatcctctacataaacagcttttccatcagcaagcttaatctcatctttgccgttcggtaatactgttgtttcagaaccattccaatgggggataataggattgtcaataatatgtaatccatctgttaaatttcccgccgcatacatacttcctgcactgattccgacatatataagtccgtttttaattgcattattaagtattctatcaaaaccagttctagacatttcacgacaaagcacagatacatcaccaccactgacaaaaacagcatcaaattggtttaattcttcaaaagttaatagccttgtaagcataaacggggttgtaacatacgaagaataggttctttgatagtcttttgaaagaattaattccagattgtacactaatatattttcgtactgaattcccattagaaagagttcatgaaaacatattgcaagcgactctcttgcaccatctgtttcaatgccagctgttggaatataaagcactttcacatccttcggacactttccaataatatcaaagaatttctctttcatcttatcggtcaaccctgcagatgtaagaaatagatgttttccattcatattcttttacctcgtcaaactccgatttactgggctaagccgagtataccacactccaccatgaaagaacaccccgatatagtgaaattttgccatttttctgcgtacgtgcgtacacgctccgcagggattctaaggggcttgaccccttggcacacagactttggcacaaagtctagtgtgttacaccttgtcagaggtgtacaggctcccggtacgcacgtacgcagcgactactcccaaacgcgccatatagggggacgaccaagttcgcacaaagcgaacttgattccgcaaagcaaaaggcaggataccactatcatagtgataccctgcctttgctcgtttaccgttccgagtagtccttccgcagaacttccgataaacaaaaaacgtacccaaaccctttttcataaagaatcgggttcgagtacgaactgtatggtggacggtacaggactcgaacctgtgacctcctgcacgtcaagcagatgctctaccagctgagctaaccgtccatattctgttttgccgaaatcggctagattataataccatagcctgtgccaaaaagcaagaccttttttcgaaaattgtaaaacttttttgaaaaagcaccccgaaatccggcttctgtgcggtgcagcgcgggttttggggcggcggacgacagctttcttgttgcccccaaccagacgttgtgctataatagaaaactataataggagtagtgtcggaaagggaatgcagcatgagagttttgggcatcgaccccggttacgccatcgtgggctggggcgtggtggagtatgcgggcaaccgctttgcgccggtggatttcggcgcggtgtgcacggacgcgggcgtaccgtttgagcggcggctggatgaggtgtataccggcatcaaggaggtcatcgaacgcacaaagcccgaggtgcttgccatcgaaaagctgttctaccagcacaaccagaccaccgtcatcggcgtagccgaagcgcgcggggtcatactgctggcggcggcgcaggcggggctgcccatctacgagtacacccccatgcaggtcaagcaggcagtcaccggctacggcaaggccgtgaaaaagcaggtgcaggagatgacccgggtgctgctgcacctgcccgccgtgccaaagccggacgacaccgccgatgcgctggccatggccattaccttctgccacaccaacggcaatcagctcaaccgctatacccgccgggtggcgggccccatctgaccgcataccacagccgccctgcggggcggcgggtcttgactgagaggattttatgatctactgtctgactggaaaaatcgtgaaaaaaagcctgaacgccgtggtgctcagctgcggcggcgtgggctactatacccagtgcccggccagcgtggcgggggcactgcccggtgtagggcaggaaaccactctgtacaccgtgatgagcgtgaccgagaacgatgtaagcctgtacggctttgccaccgaggagcagcaggcctgctttgagatgctgaccgccgtgtccggcgtgggccccaaggtggggctggccatcctcagcgtcatggagccgcagcgggtggcgctggccatctcggcaggggaccacaaggcgttcaaggctgcctccggcgtggggccaaagctggcgcagcgcatcgtgctggaactgaaggataaggtggccaagggctttgtggacggcatctcgctggaagatgtggcgggctctgccgccgacacgcccgcgacccagagcagcgcacaggccattgcagcgctggtgtcgctgggctacagccagagcgaggcggcgctggccatcgcaaagatcgatgccacgctgccggtggaagagatcatcaagctggccttgcgcagcatggcaggcaggaggtaagcaatgcaggacgataccgcgctgtacggcgcaaaaatgatgcagcccgtcatgaccccggcggacaatgaggaaaataacctccgcccgcagcatctggaggactacatcgggcaggaaaaggccaagcagaaccttaaaatttatctggaagccgccaagcgccggggcgagccggtggatcacattctgctgtacggcccgccgggtctgggcaagactacgctggcgggcattattgccaacgagatgggggtgcagatccgcatcaccagtggcccggctattgaaaagcccggcgaccttgccgccctgctgaccaacctgcaggagggcgatgtgctgttcatcgacgagatccaccgcctgtcccggcaggtggaggaggtgctgtatcccgcgctggaggactacgcgctggatatcatgatcggcaagggccccagcgcccagagcatccgcatcaatctgccccggttcacgctggtgggcgctaccacccgcgccggacagatcaccggcccgctgcgcgaccgcttcggcgtgctgcttaagctggaactgtacagcccggacgagctttcccgcatcatcatgcggtcggcgggcattctggatcagcccatcaccccggaaggcgcttatgagctggcaaagtgcagccgtggcacgccccgcgtggcgaaccgctttttgaagcgcatccgcgacttcgccaccgtgctgggcgacggcatcatcgatcgggatgtggcgctgctgggtctgaagcggatggacgtggacgcgctgggtctggatgagctggaccgcagcctgctgcgcgccatcattgagatgtacaacggcggcccggtaggtctggaaacgctggccgccgcgctgggcgaggaggcggtcacgctggaggatctgtgcgagccgtatctgatgcagatgggctttttgacccgcaccccccgcggacgctgcgccacccgccttgcctacgagcatctgggcatgaaagccccggagaccggcagcgccgaggaaaacggccagcagagcctgttctgatctatcatataaaggaattaaacggaaggaggacgctatgcgccctgcagatacttggaaagactatgagctgctggatgccaccgacggcaaccggctggaacgctggggagagactttgctcatccgccccgacccgcaggtggtgtggaagacccccaagcagagccccctgtgggcaaaggcagatgccatctaccaccgctccaatcagggcggcggcgagtgggagtaccgccgccgtctgccggaaaagtggaagatcagctgcggcgagggagaggataagctcaccctcatcgtcagccccaccggcttcaagcacaccggcgtgttcccggaacaggcggtcaactgggcttggtaccagcagaagatccgcgccgcgaaccgcccggtaaaggtgctgaacctgtttggctacaccggcggcgctacgctggcctgtgccgctgccggtgctaccgtctgccatgtggatgcttccaagggcatcgtggcatggggcaaggacaacgccgtggcaagcggcctgaccgataagcccatccgctggctggtggacgactgcgccaagttcgtggcgcgggaaaagcgccgcggcaacacctacgacggcatcatcatggacccgcccagctacgggcgcggccccggcggcgagatctggaagctggaggactgcatctacgacctcatcagccagtgcgaagaggtgctcagcgataccccgctgttctttgcggtcaacagctacaccaccggcctgtctccggcagtcatggagtatatgctcaagaccacgctggtgccccgctttggcggcaaaaccagctgcgacgagatcggactgccggtgtccgccaccggcggcgtggtgccctgcggcgccaccgccatttgggaagaataaggaaagaactccctcagtcacggctgtcgccgtgccagctccctctttgggggagctggcaaatctgtaaagatttgactgagagggcgaggacgttaaaaacaagcaatcaatttcaatagaatggggtacagcccctttcggaggggcgcaccaccagaaagagaaacaaagcatgagtgatacgattttaactgctgaaaatttgaagttccgctacgatgccgagcagccggtctatgcgctggacggcgtatctgcgcaggtaaagcgcggggagtttgtggcggtgctgggtgcaaacggctgtggcaaatccacgctggccaagcacttcaacgccattttgctgcccgagagcggcaaggtgtatgtggagggcatggacaccgcagacgaggacaagctttacgatatccgccagactgtgggcatggtgttccagaacccggacaaccagatcgttgccaccgtggtggaagaggacgtggcctttgcgctggaaaacctcggcgtgccgcaggacgagatgcgccgccgggtggacgactccatgaagatggcgggtatctacgaataccgcgagcgcgcaccccacaacctttccggcggtcagaagcagcgcgtggccatcgccggtgtggttgccatgcgcccggactgcctgattttggacgaagccaccgccatgctggacccgcgcggccgcgagcaggtgatgcagaccatccactacctgaacgagaacatgggcattacggtggtgtccatcacccactatatggaagaagccgcacaggctgaccgtgtgctggtgatgagcaagggtcatgtggtgatggagggcaccccgaaagaggtgttcagccagaccgaaaaggtgcgtagtctgcatctggacgtgccgcaggccgctgagctgcgggacgagctggtgaaggccggcatcccgatgccggagggcatcatcgacaccggtgcctgcgcacaggcgctgtatgagctgctgcagtaaggggggcggacgaaatggcagatatcattaaggtagaacatctgagctacgtctataaccccggcctgcccaccgcagtgaccgcgctggatgacgtgagctttaccgtagaagagggcgattttgtgggcatcatcggagccaccggctccggcaaaagcaccctcatcacccacatgaacggcctgaacaagcccaccagcggcaaaatttatatcgacggccgcgatttgtgggcagacccggaaaagatccgggatttccgcttcctcaccgggcttgtgttccagtacccggaataccagctgtttgaggagacctgctacaaggacatcgcctttggccccaagaacatgggtctggacgaagccgaggtagaccgccgcgtccacgaagccgcagactttgtaggcttggacccggcgcttttggagcgcagcccctttgagctgtccggcggtcagaagcgccgggtggcggtggctggcgtcatggccatgaagccccgcatccttgtgctggacgagcccgccgccggccttgacccggagggacgggacgatatcctttctgaggtgaaggagtaccacaaaaagaccggcaccaccgtgctgctggtgtcccacagcatggaggatattgccaagtacgccaaccgcgtgctggtgatgagcaacaagaaaattgccatgtacgacacggtggaaaaggtctttgcccgcgccccggagctgctggagctgggactgtcggtgccgcaggtgactaaaattttcctcaagctgcgggagatgggggtggacgtccctgcggacgtgtacaccatcccttacgcggtcaagaccctgctggaagccaagcgccgccgcgatgccggggaaagccttgtgctgccccgcagcactgcccggaaagggggtgctgtctgatgctgcgagatatcaccatcggtcagcacttcccgggcaacagtctggtgcaccggttcgaccccagactgaagcttgtgctgacggtcgcttatatcgtgctgctgtttgcagcctccaaccccttggggcttactttgtccatcctctttttgggggtcatgtacaaggtggcaaaaattccggtcaagatgatcggcaaaagcctgaagcccatcctgcccatcgtgctgttcacggcggtgctgaacctcttctttgtttccggcgagggcgacccgctggtgcatttctggttcttgtccatctacgccgagggcgtgcgctacgcggtgctgatggcggtgcgcgtgatggcgctcatcgcgggcaccagtctgctcacctacaccaccagccccatcgtgctgaccgatgccattgagcagctgctcaagcccttgggcaagctgcacttcccggtgcacgaacttgccatgatgatgagcattgcgctgcgcttcatccccaccctcatcgaggagacggataagatcatgaacgcacagaaggcgcgcggcgcacagctggacaccggcaaaatgaccgaccgggtcaaggcgctggtgccggtgctcattccgctgttcatctcggccttccgccgcgcggacgagctggctatggccatggagtgccgctgctaccgcggcggcacaggccgcacccgcctgaaggtgctgcgctgcgaaaagcaggactacatcgaccttgcggtgtgcatcgcctgctttgccgtcatccttgcctcccggctggtgttcccgaattattaaagattaacagcctcgccctctccgtcattgcttcgcaatgccacattcccccttttgtcgctgcgcgacatcttcccccggccgggggaagtctttcctcaaagggggaggccttggcagtccacgcaaactttccggttttgccaagggctctccctttgggagagctgtcaaggcagcaggccttgactgagagggcgagcccggcagaataagagttggtttttatgaattttctgctcacattagcctacgacggcacaaattactgcggctttcaggtgcagcccaacgggcgcagcgtggcagccacctttcaggatgcactggaagcggtgctgggcagccgccccgatatcaagggctgcagccgcaccgatgccggggtgcacgcgctgggtttccggctgaacttccatgccgatacccgcatcccgccccagaagctgccgctggcgctcaaccagcatctgccgccggatatccgggtgctggcggcgcagactgtgccggaggacttccacgcccggtacgccgcccataccaagacctacctgtaccgcatccataataaccccatcgactcgccctttgacgccgcctactacacccgggtgccccggcggctggacgaagccgccatgcaggcggcggcgcagcagttcgtgggcacccacgattttctggcgctgtgcgcggcgggctcttctgccgccgcccacggggacaccgtgcgcaccatcacggactgccatgtcacccggcgcggggacgaggtggacattgaggtgaccgccgacggttacctgtacaacatggtgcgcattctggcgggtactttgtgcgaggtgggcgcggggcggctgcgcgcggcggacatccccgccattctggcaagccgggaccgcagccgggcaggccctactctgcccgcaaagggcttgtttttaaagtgcgtggattacccggaaaaggaggagcagccatgaaaaagcttcatcgcggcggcagcagcccggacggagagccgctttctgccgggcgtgtggaatatctggaagcagcgcgccagcgggtgcgccgccgccgtttacgccgcaccgccattcttctggcggcgcttatactggtcactctgtttgccaccggcgcggtgggtgcatccatcgccagggtaaaggatctggtggatacggtgcacatcgccctgtccccggcggtgggctggccgcagcagaccggccttggcgatctgacggcagtgcagcccatgtccggcagctttgcagccatggacgaggatgcctgtgtggtgtacagccttggcggcacccgccttgccggcatccagagcggctacgcccgcccggcgctggctgcgggcaagacccgctttgtgctgtacaaccgctccggcaacgagctgcgggtagaaagccgcacccagaacctgtacagcaaaacgctggaaaacagcatctatctgtgtgccatgtcggacaccggaacgctggcagtggcaacggactctgccgacagcaccgcccggctgaccgtatatacccccaccatgagcgaacagctgcactgggatatgaccggcacgcagggcaccccggtgcggatggcttttgccgccgacagccgccgtctggcggtggcggctgtcacctccagcgccggacagttacaggcaaacctctttgtgctcagccttgcgcagggcgacccggtgcagctgagcagcggggacagcgtgccccaatggctgggctggctgaacaacgacaccgtgctggctgtgtacgagaactgcgccgtggtgtacggtgcggacggcggcgagcgggggcgcttcgaccttggcggcggcagtcttgtcagcgtttcgcaggacggtgcaaacgccgccctgctgctggaaaacgggcaggtgtgcaccgccgtactgctggataaagacctgaacgtgcagtacagcggcaacgtgcctgcggcaaaccagatcctgcgccggggtcaaaacttttatctgcttaccgacagcggcgtggaatgctttaccgcagacggggtgtaccagtggggacagacgctttccgtccgtccgcaggcgctcatcgcgggcaagcagctgctggtgctgtgcggcaacacggtgcagcagatcgctccgccggagcaaacggcttccagcgcccagtgaccgggggaaaaaccagtatttttgcggggaaagtgatctttataacagggaaaacaaggtatgttcaagaatccgtcatttctttttgatatcctatgtacggtggtctggctggtgctgatggtacgctatgcccgcaagggctttcttgccagcatcgtgcagctgtccggcaacctcatcagcctgctgggcgcacggcagtgttctgccgcctgtgcgggctgggtgttcgaaaatctgctggccgggggcttccgcacccagatcgccgcccacctttcggaggacggcgtggtgaacctttccggcattgcccagcagtacgcgggctttctgccggaaagcttccgcgcttccatcgtggcggcgtgcgagcgcagcatcaacgccgtgctggcagacaacgccgtggtgctggccgacaccatcgtggaaaaagtattgcagccgctgctcaccccggtgatcatgctggtgctgttctttgtgttctacgcggtgctgcggctgctggtcagtatgctggtcaccgtgctggggctggtgaataagctgccggtcatcggtacagtgaaccggggtctgggctggctgaccggcggcatgaccgcaatgctggacctatacctcgtgctgtgcgtggtgtgggggcttgtggtcatcaccggcggcaatttaaatgtgctcaacgacactgtgatgcgcagcagtctttactataaagcgtttaatatgttcaacccctttttgtaacaggggcgacaaggaggaactatggtctgtattcgatgccagaagcgtccggcgatcatctttatccagcggatggagaatggtcagatgaagcaggaggggtactgtctgcactgtgcccgggaactgcacatcaagcccgtggacgatctgatgaaacaattcgggatgtcggagcaggatctggataacatggaaaaccgcatggagagcatgatggaggagctgggcgattccaaccccctttccatgctgatgaatatgtccggcagcggcgaggatgccgatgcggagaacatggacgaagatcttgtacccggcagcaatgccaccttcccgctgggctttaccggcacggaaaagcaggacggcgaaaagaaggccgaccgcaaaaacggcaaaaagccgcccaagcgcaagtttttggatacctactgcgaaaacctgacccgcaaggcgcgggagggcaagctggatgatatcatcggccgcgaccgcgagatctaccgcaccatccagatcctgagccgccgccagaagaataacccctgcctcatcggtgaagccggtgtgggcaagaccgccattgccgagggcattgccgagcgcattgccaagggtcaggtgcccatcggcctgcgggataaggaaatttttctgctggacctcaccagccttgtggcgggcacccagttccgcggccagttcgagcagcgggtcaagggcttgctgagcgaggtgaaggccgcaggcaacgtgatcctgttcattgacgagatccacaccatcacctctgccggtgagagcgagggcgccatgaacgcgggcaacatcttaaagcccgccctctcccgtggagaaattcaggtcatcggcgccaccacctttaccgagtaccgcaagtacatcgaaaaagatcaggcgctggagcgccgtttccagcctgtgcgagtggaggagcccagcgtagccgacacccttgcggtgatgaacggcatcaagcgctactatgagcagcaccatcatgtgcaggtgcccgccgaggtgctttcggcggtggtcaccctgagcgagcggtacatcaccgaccgctttttgccggataaggccatcgacctgctggacgaagcctgcgcctgctgcaatctggcgcacccggtcatctccgagtatctggggatgcagaaagaactggacgccctgaaacaggaagaagccgagatggaaagcgcggatgtgaacgaagccatcgactacgagcgcgtagccgagcgcaagacccgcatcgccaagctggaatccgagctgcctgcaaagcaggccgctgccagcgaaattcaggtgaccatggacgatgtggcaaaggtcatcgagctgtggacgggcatcccggcggtgaaaattcgggagaccgagttcgtcaagctggcagggctggaaaatgccctcaagcagaaggtcatcggtcaggacgaagccgtgcatctggtggcgcaggccatcaagcgcagccgcgccgacctttccggccgccgccgccccgcaagcttcatctttgtgggccccaccggcgtgggcaagaccgagctggtcaagcagctggcagaacagctgttcgatggtcccgacccgctcatccgtctggacatgagcgagtacatggaaaaatacgcggtgtcccgcatgatcggttctcctccgggctatgtgggttacgaggaagccggtcagcttaccgagaaggtgcgccgccgcccctacagcgtggtgctgtttgacgagatcgaaaaggcacacccggacgtgatgaacattctgctgcaaattctggatgagggcaagatcaacgatgcgcagggacgcacggtggatttttccaacacggtcatctgcatgacctccaacgccggaagcagcgaccagagcgcgggcagccttggctttaacaagagcgatgcccagcgcagcgaggaaaagacccgcaaggcactggcgcagttcctgcgcccggagttccttggccgcgtggacgaagtaattgccttcaagcccctgaccgaggagaccttgcagggcatcgccgccctgatgctggacgagtacaagcccggcatggaggccaagggcatcgcttacagctacaccccggcagcgctcaaggcactggtgcaaaagagccagggcgggcgctttggcgcacgcgacctgcgccgcaccatccgcaaggcggtggaggaccccgccgccgagcgcctgatcgacggcacgctggcatccggcggcacccttgtggtggatgctgatgaaaacggcgaagtcgtgctgaaataatcataaccgcaaagcaccccggctggaaacagccggggtgctttttgtctgctcacaaaaactttttgtaatatatacttgacatttagaatggtaaatgctactatatgtccagaggataaaacaaatgccgacccggcaggaaaggagcgtatcaatgccgaagaacctgaaattaaaggccgcccgtgcggaaaaggatatgacgcaaggcgcgcttgccgaagcggcaggcgtttcgcgccagaccatcaacgccattgaaaaaggggagtacaaccccaccatcaacctttgccgcagtatctgtaaaattctggataagacattggatgaactgttctgggaggaatgagttatgaaattttcactatacagcaagaaaaaccggttggacgagatgcaggagcagaccatgcgcaaaattgaaagccatggcttctggctgctgtggggcagccttctggcggcgtggatcgtgcagacggtgttcggggctgcggacaaggctgccggagagtgggtcgtattcatgatcggctgtatctatatggttgtcgcgtgtctgcgcaatggtctgtgggatcgccacctttcggataaggccccggccaatgccgtgtattctctggtggctgcggtggcggttacgctgatctgcgggttttcccgtggatactggatcggtgctgtttttgccggtgtttttaccggcatcctgtgctttgcattgctgcagctgtgcgccgcattgacacgcaaacggcgcgagcatctggatgacccgaaggacggagaataatattacgagcagacgttccttttgcatgacgtagtatcgtataaagtaaaagcatctgtaacaatcgcttctggatttcagaaagtcggcgaatagttgttgcggatgctttttctttagcgggctcgccctctccgtcacctgcggtgacacctctcccaaagggagaggccttggcaaagagatggagtttgcgtggactgccaagggctcccactttgggggagctggcaaagccgacaggctttgactgagagggcgaggacgctgcccgtgtgcagcagccccttttgtatgagtgcatgatattatctcgcattgacaaatctgcgcagaataagtacaataaaacatagctatccgcaaattttttgcatgagaataaaggagcgtttttctatgccgagcaataaagtccgcacccgttttgcaccctcgcccacgggttatatgcacgttggcaacctgcgtactgccctgtacacctacctgatggccaagcacgaggatggcaccttcatcctgcgcatcgaggacaccgatcagggccgctatgtggagggcgctgtggatgtcatctacaacaccctgcgggagaccggccttctgtgggacgagggcccggatatcggcggccccgtgggcccctatgtgcaaagcgagcgcatggggatgttcaagcagtatgccgagcagctggtggcagagggcaaggcctattactgcttctgcaccgaggagcggctggaagctctgcacgccgagcagcgcgctgccggtgagatgacccactacgacggctgctgccgcgagctgcccaaggaggaagtggaaaagcgccttgccgcaggcgagccttacgtcatccgccagaagatcccccgcgagggcgtgaccggctttgacgatgtggtgtacggccacatcgaggtgaacaacagcgagatggacgaccagatcctcatcaagaccgatggaatgcccacctataactttgccaacgtagtggatgaccacctgatgggcattacccacgtcatccgcggcagcgagtacctgtcctccacccccaagtataacctgctgtatcaggcctttggctgggacatccccacctatatccactgcccgccggtgatgaaggacgcgcagaacaagctgtccaagcgcaacggcgatgcaagctatcaggatctggtggctaagggctacctgaccgaagctgtgctgaactatatctgcctgctgggctggagcccccgcggcgagtacgccgagcaggagatcttctccctgccggagctggtcaagatctggtccccggagggcatctccaagtcccctgccatcttcgaccccctcaagctgcgcgccatcaatgcggagtatatccgccgcctgagccccgaggagttccagaagaaggccgagccgtggatcgacagcgccgtgcacagcgccatcgacaaaaagctgctgtgcgcaaacctgcagccccggtgcgaggtgctgggcgagatccccgagcagctggatttctttgacgccatgccggagtacgacgtgagcctgtacgccaacaaaaagcaaaagaccaccccggaaacggccaaggaagcactggaagccctgctgccggtgctgagcgatgagacactggattttgcaaaccgcgatgccgtgttcgatgcctgcaaggcaaaggcggaagaactgggcaaaaagaacggctggctgctctacccgctgggcattgccctgtccggcaagcagcgcacccccggcggcggcaccgaccttgcctgcatgatgggccgcgaaaagactctgcagcgcgtgcaggatgccattgcaaagctgaacggctgagcgatataagtatagtgatctgggaggtggaacctatgatgtacccgtttatgacattggatgacgataccgagatcgtgcattccgagatgaagcccgatggccgggtgaaggtgtaccttgaaaaaccggatgcagaagattgtttccactcagcagtgtgctggctgccgggctatgactggcaggaggtgcacggcttcacgccggaggagatcgcgcgctatcagaagatcgtggagtccaccgcgcatctgatcttgcagttctcccaagaaggaggcgtggaaaatgccgcaggtttttaaggttggctcctactgggtctacttctgggccaatgagaacgaaccgctggagccgatccatgtgcacgttgcacagggggcacccaacagcaacgccaccaagatctggatcaccaaggcgggcggctgctacctgtgcaataataactctcagatcccgccccgggtactgcgcaacattatggcagttattgaagcgcgcagcggggaagtaatcgaaaaatggacagccttttttggcgagatccgctatttctgctgaacagttgaaaatacccccaaagccctgcggcaaaatgacggccgcagggcttttttgcgtctttgggcgggtttgggacggttctatgcaccgcgccaaaaactgccgctgccccgcgttacagtatatgcagacagtgcggggaacagaacaaactccccgccggaaagcgggggatttttatgacagagcggatgggtgttttatcttcggacgggcggtgtttgcagccttcgcccttggcggcacgggcgatgttgcgcccggcggcgcggcggctggcagcggtaggcatcggctttgcaggcggctgggcggtgctgtacggggcgctgatgccttttggactggggctgacccttggtctggcagaggattgctttgccccctgcgcggcaggggcggcgctggggctgctgctccacgggctgggagcactctcgctgcgcagcctgtgtcagctgtgtgcgctgggcgctgccgtggcagcacgctggctgctgccgcaaaggtttgtgcccgccgcgctggcgggctgcggtactttgaccggcatggcgctgtgttttgcgctgggcagcagcggcggggcagaccttttgctgtacagcacggcggacgcattgcttgcggtgagcatcggctttgggctgcgcaaatttgccccggagcgcccgggcatgggcacgctgctggtgggcgcagccgtggcagcggcgctgggcagtgtgcggtggggatggttttcgcccggggtattggcgtgtgccgccgcagagctggcactgtgctgccgggcgcagaagcttgccgccctgagcggaagtgcggtgctgggcgcagccctctgcgccgcagaccctgcccttgccccggcggcagcggggcttggctgtgccacagcagcggcggcggtgctggcgcccggacggcgggtggagacccttgccgcctacgcgggcgggtgcgtgtccggggtgctctgcgtgcagccgcccggaaatgcctttgggatgctgttcagcgcctgcggcggcatggcggtggtctgcctgctgcccggcggttggcttgccccggcggcagacatctcacagagcggagagagcgcccccgcgcccgcccgcagtgcggcggcatctacccggctggaagccgtggcgcagagcctttcctcactggcggagacggtgaacgcggtctacgagggcttgccccggcggcgggaaggtttccgctgggtcatagataatgtacatgatactctttgttttaactgcgggcggcgggagacctgctggaagcaggagtacaccgccaccatggcgggcatggaagcgctgcgtccgctgctggaacagaatggcagcgtggaaacagcgcaattgcctgggcaattgtcccgctgcatccacccggcagcgctgtgcgcggcggcggggcgcagctttgcgctgtaccgcagccgcaaggaagcgcgcatccattccgaagctatgcgcaccgccctgaccgagcagtacagcgccgtagccgaagcgcttggggtgctcagcgagcagctggggcgtcccggcgacccggaaccctataaatccagccgggtggcggagttctttaccgggctgggtgcgccgccgcaggagtgcgccgtcacgctggacgaccttgggcgcacccatgccgccgtcaccctgccgcgcacccggttcaccccgcaggagctggcggcgctggcgggggaggtggggcatatctgccgccgcacgctggaagtgccgcaggtgctctcctgcaagggtatgaccaccctgctgttcagcgaaagaccggcgctgcgggcggtgttcggcgctgcgagcgcagccgcccggggtgaggtatccggggatgcagtgcagcaattctgcagccctacggcggcgcagatgatcttatgtgacggtatgggcaccggacgcccggcggcggtggacggcaatctggcggcagagctgaccgcccggctgctcaaggcgggctttaccgccgagctggcggcgcggctggtgaacgtggcgctggcgctgaaaagcgaggacgagagcggcgcaacgctggacctcatcagcgtggacttatacaccggcacggcgcggctgttcaaggccggagccgccccggggtttctggtgcacggcggacgggtgcgggccgtgggcgaagccactctgcccatgggggtgctgggcggggtgaacggacagagccgggtggtgcacctgaccgccggggactacgcggtgctggtatcggatggcttgctggtggacggcgcgggctgggtggcaaagcaggtggagctttcggcggcggcaggagacgcgccggaaaagctggccgaaacgctggtggagaccgcccgcatccgcgcacaaaagaccggccgcccggacgatatcaccgccgccgtgctccggctggaaaagagcgggtaacaggcatataacacaaatgagctttttacatcttgaccggacgtctaaaagccttcaccccttggggggaaggtggcgcgcagcgccggatgaggggtaattccggcagcagcgccctcatcagtcacctgcggtgacagcttcccccgaccggggaaagccacaaataggaaggagctaccgctggactttacagaacttccgttgcaatttgcgggaaggaggggtatactggaagcatatttttcagcccggcagcgccgggcgcaggaggcggcttatgcttaccatcaacgttgcacccgacggcagcggacagtttaccaccatttccgaggcggtgctggcggtgccctacgactgccctgcggtcatccgcatcgcgccgggcatttaccgggaaaaactggtttgtgaaaaaaaggatatcacccttgcgggcgcgggcatggatgccacccggctggtatggaacgatggcggcaagctgccgcacccggacgggcgtcccacccacaccttccgcagctacaccgcctttttcagcggcgaaaagctgcgggtagaggatatgaccattgaaaacgacgcaggccccggcgcaagggcgggacaggccatcgcagcctatgtggacagcgcccgggcagcgtttgaccgcgtgcggctgctgggcaatcaggataccctgttttgcgcccctctgccggagaaagagcgggagaaggacggctttttgggcccgcgcgggctggcaccccgccgggcaagcgcacagtattaccacgcctgcgagatcgccggggacatcgattttatctttggcggggcggacgccctgtttgagcactgcaccctgcgcacggtggacaatggccttgcgcacagctgggtcaccgcgccttccggcgcggcggatgggctgggctttgtgttctgggactgcgattttgtctcggactgcccggcgggcagcgtgtatctgggcagaccgtggcggcctaccggcaaaacggcggtgctggactgccgccttggggcgcatattgcgccagagggctttgccggctggaacgaccgcaccgacacggcgctggccggctttgccgaagcaggcagcaccggcgcgggcgcaggggagcgccccggctgggtacaggcgctttcggctgctgaagccgctgcgctgctgcgcgctgcccggcagaagtgccgcatggagactacggaaaggataacggaatgaaaaaattacccaatgcagtaaaatggctcatcattctggtggtgctgggcgctatgggcgcgatgatgtgggcggtgaacgaccgcgcctcccgggtggagatgcccgccccggacaacacctttggcatctaccatacggcagagagcggaacgacttaaagaaactgctgcttgcctgcaccctcatccggcgctgcgcgccaccttcccccggctgggggaaggctttccgcacaggaagagcctcaggttcaaccggaaactttgtcgctatgccaaaggctctccctttgggagagctggcgcgttagcgcctgagagggcgagcacgctcaaaataaaagcatctgcaacgaaaacgctgtttttctgaaattcagaaagcgctggttgcagatgcttttttgttttgtgtaaaagggggcgttcacttaccctcaaaatcgtccacatagggcagatcactcatgacgaaccagaaggtggtgcctttgcctacggtgctttgtacgccaaagcggaagctgtgctgctggaagatggccttggtgatggaaagccccagaccggtaccttgcttgcctgcgtccgagcgggagcggtagtaccggtcaaagatatagggcaggtcggcggcggcaatgcccgggccgtgatcctctacctctacccgcacgccctcagagcagcggaaagcgcgcaggataaaaatgccgtccttgccgatgtggtgcatggcgttgcccagcagattgtgcagcgcccgctgcatcatgtccgggtcggcgtaaaccggcagttcctcctccggcagctccagcttcagctgccagccgttctgggcgcagacggcgtcgtagcgctcgcttacttcatcgcacagctgccccatgtcaaagtgcacccgctcgcacttataagtgccgctggtcaccttgctcagctccatcacgctggacaccagtgcggtcaggcggtcggcctcgtccacaatgatgttcatctgctcgtcccggtgggctttgtcgtcgccggtcaggtcgcgcaccgtttcggcatagcccttgatgagggtcagcggggtgcgcaggtcgtgggagacgttggccagcagatcgcgctgcatctgcaccgcgtgctgcacctcctcggccatgtggttgaagtcccgggcaaggtcgcccagctcgtcgttgcggcggttgtccacctgcacggcgtagttgcccagcgccatctgccgtgcggcgctggaaagctggcgcagcggctttgtgaaccactcgctgaacagccacgccgccgacatggcaaaaatgaagatcagcgccgccgccagcggcagcagggtgctgagcaccttgccagcctcggcaacgtgcacaaggctggtagtcaccagcacggtgtagctgccgtccgccgtggtgcgccccactaatagctgcgccgagccagagagacggggcgggttgagcgtctgcacaaagctgcccatgctgcggcacttgcgccgcatggcaagggcagtggcaatgatcttatcgttgttggcagaatccgaaagataggtgccgtgcaggttgcagaaggactgattctcgatcttataaatggtgtgcagggtagtgtccgagatatccacgcagaagctgttcaaggtacccttggtgtacagttccagcgtgagcttatcaaaaaaatcgctgttgaccgcaagctgcccgaaagaccagctggacagcactttgccctcggcaatggcatcgtccagccgctccacgatgctgtcggcctgattggtaagctgggtctcgatgtgtttggtgtacaaaggctccagcagctgggtggacagcagccagaacagccccagcagaaacaggcagatgaagcacaaaaaccacatcagctgcccgcggatgccaagggtatgccgtgctttggtggtttgccgcatggaccgcacgctccttcagtcaacgggcggcatcggggtcgaacttatagccgatgccccataccgtagcaatgtagctgcggcatttgcccagatggccgcgcagcatctttacatgggtgtccacggtgcggtcctcgccaaagtagtcgtagttccacaccttctgcaggatcttttcccggctcagggcaatgcccttgttggacgccagaaataccagcaggtcaaactccttgggggtcagggccacttcctcgccggatacccgcacggtatggctggcagtgtcgatggtcagctcgccaaaggtcatggtgttggcagtctcgggggtgcggggcatggtgcggttcagcaccgcgcgcacccgcgccaccagctcccggggggagaaaggctttaccacatagtcgtctgcgccgctttccagcccggccagcttgtcgtattcctcgccccgggcggtcaggatgatgaccggggtgttgatgtggcgggcacgcatctcccgcaggcaggtcatgccgtccataaagggcatcatcaggtctaagatcaccagatcaaacccgccgccggacagctgtgccagcgccgcagagccgtccccggcttcctcgcagatatacccggaatattgcagatgctcgtggatcagctcccggatgcggggctcatcgtcaacgatcaggatctttgccataaaacaggactcctccctatcatatatcagtatacagctctattttaatgcaagaattggaaaaagctgtgaattttaagtgaatggtttggaaaaacaaagccgtctgcacccagtataccacacagggcggcggggcggcaatctttttgcgggaaagcgcagaaaaaggcactggggaacttgacaagaaaacgggcgtttttgtaaaataaagtcgtaaaaactggggcatttgcggtaaaaaggaggagcagtcatgagcatccccaagatcatccactactgctggttcggcgacgggcccatcagcccggagagccgcaaatgtatggaaagctggaagaaatactgcccggattacaagatcatggcgtggaacgagcagaactttgatatcagcgcaaaccgctatgcacggcaggcgtatgcggcaaagaaatatgcctttgtatcggactatgcgcggctggcagtgctgtacgagtacggcggcatctatctggacacggacgtggaactggtgcgcccgctggatgagctgctggagcacaagggctttatcggcatggagcacagtgtgccaacaccctacggccgcacgctgctggtaaacaccggctccggcgtgggcgcagagccgggctgcgggatgatcggcaaaatgctggcggcttaccggaatgccgcctttattcaggaaaccggcgagccggatctgcgcacctgcacccagcgggacaccccgctgtttgccaaggccggtttgcagcagaaaaacgagcagcaggagctggacggctttctggtgctgcccaccgactgcttttccccctttgattatgtgaccgagcggatgcaccggacaccgcgcaccttcggcatccactactatcagggcagttggcaaagcggcgataaggcaaaccgctggcgcaagcgcttcaagtgcaccaaagtcgggcgctggtgtatgtggctgcggcagtgttcgccccgctggctgcgggaaaaacggcgcagcctgcataaccgctgccgtctgcaatggaaaaaatggttcggctgccggggactgcaatttggcagcagcatcctgctggacagggaactccggctacggctgaacagcggctcccgggtgacgctgggcgaccgggtggagagcgacgggcgggtgtccatcaccaccggctattccagccggctgaacatcggcagcggggtctacttcaacgatggcgcggtcatcagctgtcttggaaagataaccatcggcgataacaccctttttggccccggggtgaagatctttgataataaccaccgcttcagccgtgaggaaggggtcagccgggaatgcgctgcaggctgcatcaccgtaggacgcagctgctggatcgcttcggacgtggtgctgctcaagggcgcggatatcggggacaactgcgtcatcggcgcgggctgcatcatccgtggcaaagtgcccgccggttccctcgtgacccgcagcggggagcagaccatccggccaattgagacaagatagcgcataaaagtctgctgcactagggcggcgtcctcgccctctccgtcagttcgcttcgctgtgccacactcccccttttgtcgctgcgcgacatcttcccccgaccgggggaagtctttcctcaaagggagaggccttggcaaaaagatgaagtttgcatggactgccaaaggctctccctttgggagagctgccgagcaaagcgaggctgagagggcgagcacgctaaaaaatatgagcatctgcaataaaaattcgctgtttctctgaaaactcagaagcgaatgttgcagatgctttattgtttgataggcacaccccgcttgccctttttgcgcaggaatgctatactttagcgataaaggacagtgcgctgtccgcaggtttttcagagataaggaaaagcgcttatgcgaatcggactgatcgaatttttgctcatactggctatagcgtccctcacggtagggccgcgggtggcgttgttcgtggaccggtggatgcggcgcgccaaccgcgccaacgccatggcggcgcgccgccgggcagagtatgccgcccagatggccgccgagcgggatgccatgctcaagcggttccgcaccgccagcacggtgttcggggtgggtattctgctggtgctggtgtatgcgctgggcttccgccccatcgacaccccgccgcagacctataaagcccccgacctccggcaggagacgggcgcaatgcagacggcagtgtccaccgaccggaagacccggctggagctgggggagtatcagggcgtggactgcatccgcgcaaaggacggccttttgtatgccgctgcgtggaacggtgccgccctgaaaaagcgcaccagcgaccttgtgcgcaccgatggcgggcacgctgccgccatcctgagcgtggagggggagttgaccggctttgcctttgatgccgccggggatgtgtggctgacccagctgaccaccgccgggggcaccttgtgccgcgccaagcacgacagctggggtgcagcggtggaacaggtggtcacccagctggacggtgcgccgctgggggcggtatctgccgtggaggtaagcccggcgggtaaggtgtactttgctgtggcagcggcggcaggcgcagagaacgggctggaaagcgccctgcgcaccgagctgctggcgcacaccgccaccggctgcgtgtatgtgtacgaccccgccgcccgcacggtggaaaaggtgctgggcggggtagcaggtgctgcgggtctggcgctcagcccggacggcagcaccctgtatgtctccgaccttggcagccgctgcatctgggcagtggatgccgacgcccgggaactgaccgccgggggacggggctgcatcgccgcctttgccggtctgccgggctatcccggtgcgctggctgcggacacggacggcacgctgtacatcagctaccgctgggcgcgcagcggctggctggaaaagaacgcggacagcaccctgctgcggggcattgccctgcgggcggggcagaatacgcaggagcggctgttccgatgcacggcagacgccccctgcgccgaggcggtgagccttgccaccggggcttgggagcagacctttaccggccttgcacaggacagctgcgcggcggtgtgtccgatggaaagtaaagtatatttcggtgcagcaggggcagacagcctgctggctgcaaaccgataagcgaggtgtttttgtatgaccgaagcatttgcaaaacagatcgagaccgaagcgcggcaggccatgaccgagctggtggctgcggcaaagctgaaaaagggagatgtgctcgtggtgggctgctcttccagtgagatggtgggcggtcacatcggcaaggattccagcctggaagctgcccgggcgctgtacgcgggcgctgcgccggtgctggcggaaaaaggcatctggctggcagcccagtgctgcgagcacctgaaccgtgccatcatccttgagcgggaagccgcagaaaaatacggctgggaggaagtgtgcgtcgtgccccgtccccatgcgggcggcagctgggccactacctgctggaagaacttcaaagacccggtggctgtggaagagatccgcgccaacgcgggcatggatatcggcggcaccctgatcgggatgcatctgaagcgggtggcagtgccggtgcggctgagccttaataagatcggcgaagcaaacattctgtgcgcctacacccgcccgaagctgatcggcggcgagcgtgcccgctataccgaggaggactgagtcagatggcagaaaagaatttggaagagatgcggcaggctgtggcagagatccgggaaaagatggcagccgccgcccgggaagccgggcgcgacccggcagcggtgcagctgtgcgccgcctgcaagacccgcacggcgcagaccattgccgccagtgccgccctgcccattgacgtgttcggcgaaaaccatgtgcaggagctgtgcacaaattacgatgccggagcttactgcggcaagcccagccattttatcggccacttgcagaccaacaagatcaaaaaggtgctggggcgggcaagcctgatccagagcgtggacagcgagcacctgctgctggccatcgagaaggaagccgctaaggccggcatcgtgcaggatatcctgctggaagtgaacatcggcggggaggagagcaagaccggtgctgcgccggagctgctctggccgctgctggacaccgccgccgcacaggagcatatccgggtcaagggtctgatggcaattccgcccgtaaacgatgacgatgcccagaaccgccggtatctggcacaggtgtatcagctgttcgtccgggcaggggagcgcggctaccgcaacgtggagatgcagaccctttccatgggcatgagcggcgattttgagaacgccatccgggagggcgctacccttgtgcgcatcggtaccgccatctacggtgagcgggattacagtaaaaagtaacgataaaaacggaggaaccatgccgaaaaccaaaaccaacgaccccggggcgcaccacgcaagcagcggtgcgctgatccggcgttttctgccatatctggcaaactataagatggtgctgtgccttgatctgttctgtgcagcactgacgaccctgtgcgatatcgtgctgcccaagatcatgagcatcatcaccaactctgccatgggagtgggcatcaccctgacggcgggcatcgtgctgaaactggcggcactctactttgtgctgcgcatcatcgacggcgcagccagctactatatgtccagcatcggccatatcatgggcgtgcatattgaaacggatatgcgccgggatgcctttgaccacctgctgcagctggatcacacctactacaacaacaccaaggtgggcaccatcatggggcgcatcaccaacgacctgtttgacgtgaccgagttcgcccaccactgcccggaggagtttttcatcgcgggcatcaagatcgtggcgtcctttgtcatcctgtgccgcgcaagcatcccgctgactttggcggtgtttgcctgtgtgccgctgatgggcgtggtatcggtgtacctgaacggccgtctgcgggcacgcttccgccagcagcgcgtccagatcggtgagctgaactccaccatcgaggacagtctgctgggacagggcgtggtcaaggcctttgccgccgaggacgaggagcgggaaaagttcgccaagggcaaccgcgcctttgaacagatcaagacccttggctactacgccatgggtgccttcaacacctccacccgcctgtttgacgggttgatgtatctggtggtcattctggcaggcggcctgtcgctggtgtacggtaagatcaccgccggtgacatggtggcgtatatgctctacgtcaccacccttatcgccaccatccggcgcatcgtggagtttgccgagcagttccagcgcggcatgaccggcatcgagcgctttgccgagatcatggacactccggttgccatcaaggacgcaccggacgcagtgcctttgcagcccggccccggcgagatccggttcgagaaggtgtgctttgagtacccggacgaccacaacaaggtgctgcacgacgtcagtctggacatccgcgccggagagcgtctggcgctggtgggtgcctccggcggcggcaagaccaccctgtgcaacctgatcccccgcttttacgaggtgaccagcggccgcatcctcattgacgggcaggatatccgccgggtcaccctgaagagcctgcggcaggatatcggcatcgtgcagcaggacgtgtacctgttcagcggcacggtggcgcagaacatcgcctacggcaagcccggcgctacccggcaggagatcgaagccgccgcccgtctggcgggcgcggaaaagttcatccttgcgctgaaggacggctacgacacctatgtgggcgagcgcggcgtcaagctgtccggcggacagaagcagcgcatcgccattgcccgggtgtttttgaagaacccgcccatcctgattctggacgaagccaccagcgcactggacaacgagagcgagatccttgtgggacagagccttgaaaagctggcgcacggccgcaccaccctgaccatcgcccaccgcctgaccaccatcaaggactacgaccgcatccttgtgctgggcgaggagggcatcgtggaacagggcacccacgcccagctgctggaaaagcagggcgtctactatcgcctgtggaaccagctgcccgcagaggatggggaataaaagcgcctgaaatacaaaaaagacacccggaagagtgtctttttgtctcttgtcaagggaagtgaacgggtttcatctctaggcacccaccgattcatcttgtttggcgttttgcatccaccgcaccagcgcttcggcgtcctgtttgcctttggcgtacattctttcaaggccggcgcggttcttggtcagggtggacattccctcggtgctgtccggggcgatgatgcagacaaggccctgtcgctccagctcccgcgcccgctggacagccgtgttgtaccgccatgcccggcggcgcagcccctcggctgcagcggggtaatgcgactgcagcaggtgtgccagatgcttgtcccgggcatcactactcaccagcccgatgggcttggtcaggatgagagccacccggtcgcagccgtgggcaaaggcccattccagcggaacggggtcggccaggccgccatcaaaataaggcacgccgtcgatgacgcagggctggtcgatgaccgggatgcagcaggacgccatgaggatgcggtagtcgtccgggtggaggtctgccttggtgaaatactgcgcctcgccgttctgtgcattagcggccaccacgcagagctctgccgggctgcggacaagcgccgcataatccagcggattctcgccgcctgcattgctgagggtgccgtagacatagcccagatcgagataggagtgcttgcagatgaggttgtgcacactcatgtactccctgcggaaggagtattcatcgtaaaagggcttgttccgcccatgctggcctgccagataggacgccatattggcgctgcccgccgaaacgccgatgcagagatcgaagcggaggtcctcctccaggcagcggtccagcacgccagcaccgtaaatgccccgcaggccgccacccacatcgatgacaccgtatttcatggtctgttcctccatcgtttcattccattttcctcccagtataacgggacggcaggaaatactcattgagcaaacggcgggatctgatgcaatttgcggcagaaagcaggatctgccgcaatgggggcaaacaaaaacggccagcgtatcatgtgctctgtgatatgtacccctaatcgagaaaatccacccgcatatgttccagcacacctttgtcagcattttgttgtcgaaccctaatatcggcgtggcgacagtagccgcagaagccggacacgcacagcccagtaccactcttgcaatctacacgcaggtctatgacaagcggcgcaaagagattcgcaaccaaatgagcaaggaactgtacgaatgagcaaaaaagaagcacgaaggccgaaaccttcgtgcttttttggtgggccaggcaggacttgaacccgcgaccaagcggttatgagccgccagctctgaccagctgagctactggcccgcaggggtgctgcattgctgcaacacgcactagtataacaaaaactgcgcaaaaaggaaagcattttccgcaaaaatcatttggtgcggtgggcatccagcttttgcagcataaattcgtccagcatggcgggcgggaacagcggctctttgtagccaaaggcctcccggataaagatcaaagtcaccacggtctggcggccggggtccagccgcagggtgtacaaagtgtccagcggctgctggctgggctggtgcagcgtcaggtgcagcagaaagctgccgtcgttctcccggcggcactcgtaggcaaagaggtcggtgtcgctgcaggtgtccagacggtcaaagcattcgtccagcgcaaggccggtgcggaactcggacaggccggcggggccgtactggctgcggcgggttgtctcccgccgggagagcagatacacgatgatgcccagcgcacaggctaaaagacagacggaaacgacagcgttcatggaaagaccctccccaaaagagttttccttattgtaacacaacctgcgggggtttgtgctataatatttacaattcttttttaaatttttctgcaagccgggtacaaacgcccgggggaggggctcatgaagcttaaatttacgcgcaagacatggtatttctttttgctggctgcagcggcggtgtccatgctgggcggctttgccgtgctgggcgggatggatttttccgggctggaaatgatcgtgttctgccttaccggcatcgcggtgctgtttctggcggcgcaaaagggtgcaccggcaagggaaaaacgcaactacaccggcgtgttcgtggtgctgatgctcagcaagctgggtgccagcggctgggcgggggatatctgctcggcgctggtgtggcccgctttgctggcaacggagtacgagcgcggcagacccatccagcggcagctgcagctggtgagcgccgccgaggtgctgcggctggtgttctggatgctgaccaagtacgcgggcatgagcggccttgccttctggacgaatttgatgttcgtgctgctgacctgtgcccggggctgggcggggcttaccctgtataagacgcaggaggagaccctgtgacccagcgccgcaggacgtctaaagccaaggcaaaacgccgctttggtcgcagagcctttctggcaggggcgggcgcagccgcctgtgttgcggcggggtggtatctgcggcagaaaagcgatgcagaccgcactgctgccacagggcaggatacgcccccggcacccaaccccgccctgcccgccggggagtggcgggcggtgtgggtgagctatctggactgggcgctgctggatttctccaccgaggacaccttccgcgccggggcagcgcagctgctggacaattgcgccgggcttggactgaacaccgtgctggcgcaggtgcgccccttcggggacgcgctgtaccgcagcagcctgttcccgtggagccatctgtgcaccggggtgcagggcaaagaccctggctttgacccgctggatgtctttcttaccgaggcgcaccgccggggcatcggggtggaagcgtgggtcaacccctaccgtctgcgctcctcggcggcgatgccgccgaatctggcagagaataatctggcaaacacccacccggactggctgtgcaccgccggggaggggctgtacctgaaccccgccatgcctgccgccgcagactatgtggtgcagggggtggcagagcttttgcagaactacccggtggacggcatccactttgacgattacttttaccccaccaccgatgccgctgtggacgcggtgcagtttgcggcgagcggcgcagccgaccttgccgcgtggcggcggcagaacgtcaccgcgctggtggcgaaagtgtaccgcaccgtgaaggcggcagacccgaccttgcggttcggcatcagtccgcagggcaacccggacaacgaccttgaccagcagtacagcgatgtgaccgcgtggctggcggcaggcggggaagagaaggtcatcgactacctctgcccgcaggtgtactggggctacggctttaccctgcactccggcagcacccgctttgcctttgaaaacatcgtcccggcgtggcttagctacccccgggcgggagatgtggcgctgtacttcgggctgggggcgtaccgggtgggcaccggggacggcggcgcgaacccggacagcgtgtccggctggagcaccggcagtgcgctggcggcgcaggtaaaggacttacggcagcaggcggcgggcggctgggcactgtaccgctacggcagtctgttcggggcggaggctcccgcactggccgaggccgagtgcgcggcgctgcgggcactgaataagtgaaaattcgtgcagaaacaggcggcaaaccgcataaaataaacacaggtatcttgtgcagagcggcaaaatgcggtatacttaccctgtatctgcccgttggcagagacgcacgaaaaagaaaagtttctttgtttctatgaggaaagctatgaagatgaaaaaacagcttttggcactgctgctggcggcggtgatggtgcttagcctgaccggctgcaaggagaccctgaaaaaggtggcgcagaaggtgacaggccactccgaggaagtgcaggaggaagacaccacccgctgggcggaagccaccgccgacccgctgatcattcagggcattgcggatgcctcggcaaagtatgccaccgccaccgcagacggctgtctgtacgcggtgttcaacggcatctggagccgcaacaccggctactttaccgtgccgggcggcagtttgaacattatggcctgcggcaccgccgagggcacccagaagttcaaggtggcactgtggaaaaaggtggacggcggcgcagagtatgtgccggacagcacctactacgtcaagaccgatggcaccgactaccgctgcaccatttccgggctggacccggcggcgcagtaccgcgtgaccatctcctatgattccagccggtactacctgtacggcctgatgaaggtggagggcattgccggatgacgaaccagacgaaaaattcaatgctgctgatgctgtgcgccctgatctggggcacagcctttgtggcgcagagcgccggttccggcatgggcgcgttctcctttctggcggggcgcagctggatggcggtgctggtgctgctgcccacggtcaaggcgtttgacgccttgcaccaccggcagggcaaaccggacggcaagcccaaaacggcggcagagcgcaaactgctgctgaaagccgggcttatgtgcggcacgctgctgtttttggccagcgcagcgcagcagctgggcatcacgctggacccctctaccgcaaaggcgggctttctgaccgccatgtatgtggtgctggtgccggtgttcggcctgtttctgggccgtaagggcagcgcacagctgtgggtgagcatggccattgccgtggtggggctgtacctgctgtgcatgaaggacggctttggcagcatccagagcagcgactggctgctgcttttgtgcgcggtgctgttcagcttccagatcatggcggtggatcatttctccccgcagatggacggcgtgcgcctgagccttgtggagttttttgtggtgtcggtggaaagcaccgtggcggcgtttttgttcgagcagcctgccatggcagagtttgtcaccttcgccgggcctatcctgtactgcggcatcatgtccagcggcgtggcctacaccctgcagattctgggtcagcgggacctgaaccccgccgttgccagcctgatcatgtgtctggaaagcgtattcagcgccttgggcggctggctgctgctgcaccagaacctttctttccgggaatctactggctgcgtgctgctgtttgccgccgtggtgctggcacagctgccccttggccgcctgatgcggagcaaggcctgaggtggcggcaaagccgtgcgcccagctgcgcagcgtggagggcatccagtacgagctggtgcgcaaaaaggtaaagcagctgcatctgcgggtgcgggacaacggcaccgtgatggtaagcatccctttgacggccagtctggaacaggctgaccgttttgtgctgcaaaacgcccagtggatccgggacactcgggtgaagaacatcaccaagcggaacaaggataacgctgacctgccggacaaggccacggcgctggcctactttaccgccatgagcgataaggtctacccggcctttgccggggtgctgggtgggcagaagcctgtcctgaaagtgcgcagcatgaccagccgctggggcgtgtgctgcccgggcaagcggcagatcacccttgctttgcagctgtataaccagccccctgcggcgcagatctatgtggtagtacacgagtactgccactttttgcagttgaaccacagcccggccttctgggcagaggtggaaaagctgctgccggactggaaggcccggcgggaactgctgaaaaaataatctatcgtaaaaacggagggaagttcccttggaaaacgaaaaaaagaccggcgataaatattcaaagcttgccggcaataccctgatctttgcaatctccagcttttcatctaagctgctcaccctgatcgtacagccctttctgacctacgccatggcggagatctcggatctgggtctgtccaagattttgagccagtacgcaaacctgctcatcccctttgtgtctatgggaatgtccaacgccatcatccgctttggtctggacaagggcaacagcgaaaaacaggtgttcacaaacggcctgttgaccattctgggtggctttggcattctggtgctatgctggcccatcacccagtttttgccggatatggcgcagtacggcctgctgatctacatttatgtgctcatgagctgcctgcgcaccctgtgcacccagttcgtgcgcagccgtcagtggaacaagctggtggcggtagacggcgtgctgtgcaccgtggcgaccatggccttctatgtgctgtatctggtgggcttcaaatggggcgccaacggctacctgctggccatcatcagcggcgacctgaccagcgtgctgttcttgctgttcaccggcaagctgtggaactatgtggagctgaagggcgtcaacaaaaagctgtggcggcagatgctcaacttctcgctgcccatgatcccggcgcagatcagcttctggatcatcaacgcgtctgacctgttctttgtgcgcgagatgtgcgaagggctggacgggcgcaccggcaacgcatggagcggactgctttccaccggctacttcctgcccactatcctgaccacgctgggtctgatcttctacgacgcgtggcagctttccgccgtgacggaggaagaggagcgtgcgcggttctttacccagatcttccgcacctattccagcgtgctgttctgctgcgcggcgggcattatctggctgtgccgcccggtgatgcacgtcatgaagtccaactactactacgcatggcactttgtacccttccttgtgctggcttccacctgcagctgcttcaaccagttcatgaacagcgtgtatgtggtgaccaaaaagtcgcagcgcagcatggtcaccatgatggcgggtgctatcagcaactgcatcatgaactacttctttatcaagtggtgggggcctgtgggcgcgacctatgcgtccttccttggccttgcactggtgttcaccctgcgtgcggtggacgcccgccgcatgatcgggatgcacgtccacccggcgcgggtgctggcaaatgccgccgcactggtatttgaagcctttgtgctgctggcagagccaccgctgtacggactgtggacggggctgatcacgctggttatcatcctgtacaactttgcgggcgtatgggccatggcgcgtgtgctgctgccccgtctgctgggccgccggggcaaggcgctggtagccgccgtggacggctggctgaagccgaaaaaggcgtaaaacggaaaaattatttgtgatttcggaataccggagcgtctgcggacgctccggtattccattttcacgggaggggtttggaacgaactccctcagtcaaagcctgacggctttgccagctccctctaggagggagcctctggcgcgcccggacactttgtactttagacggaaactttcccgccatgccaaaggccccatctcagaggatgacttcccccggccgggggaagatgtcaccgcaggtgacaaaaaggggaatctgtcgccgtaggcgactgggggagttcagcggcgtgactgagagggtttgcttccaagcaatgttttttacaatttatggaacttgctcaagttttttccttctgcggattgacggcatccccctgaatccgtatactataaatatatcttgtacaaaattgtacaaacaggatacagacgaaaggcggtggacatcattctcagacgatcgctccccaagctgcgggaaaagcttttggaggcgctgcaggcggtgctgcccattgtggccattgtgctggtgctctgctttacggtagcaccggtatcgcccagcatcctgctgtgctttttgctgggcgctgccatgatcgtggtgggcatcatgttttttactctgggtgcagagatgagcatgacccccatgggcgagcgggtgggtgcagttatcacccgcagccgcaagctgcccctcatcctcgtgctcggctttttgctgggcttccttatcacgatctccgagccggacttgcaggtgctggcagatcaggtgccctccatccccagcggtacgctgatcctctcggtggcagcgggcgtgggcctgtttctggtctttgccttcctgcgtatgctcatcggcgttgcgctgccgaagctgctggtgctgttctatggactcatctttctgctggcggcctttgtgcccaaagagttccttgccgtggcgtttgactccggcggcgtgaccaccggccccatgaccgtgccctttatcatggcgctgggcgtgggcgtttccgccatccgcagcgaccgccacgcggcggacgacagctttggtctggtggccatgtgctccatcggccccattctggcggtgctgacgctgggcatcgcgttccgcgcagcggacagcacctacatcccgcccgttctgccggaggtggcagactcggtggagctgtggcggctgttccgggaaggtctgcccacctatctggccgagatcgcccgctcgctgctgcccattgtgctgatgttcggggcatttcagctcatcgccctgcggctggaccgccgcacgctggggcgcatcggcgtgggccttgtgtatacctatatcggccttgtgctctttttgaccggcgcaaacgtgggctttatgcccgccggtaactatctgggacaggtgctggcaggcggcgggatgcgctgggtgatcattcccatcgggatgcttatcggctacttcatcgtcaaggccgagcctgcggtctatgtgctgaacaagcaggtggaagaggtgaccgacggtgccatttcggcgcaggccatgggtctggcgctttccgcaggtgtgtccatctcggtgggtcttgccatggtgcgggtgctgaccggcatctccatcctgtggttccttgtgccgggctatgtgttcgccatcagcatctcctttgtggtgcccaagctgtttaccgccatcgcatttgacgcgggcggtgtggcttccggccccatgaccgcaacctttctgctgccgctggcgcagggtgcctgcgtggcggtgggcggcaatatcgtcaccgacgctttcggcgtggtggcgatggtcgccatgaccccgctcatcaccgtgcagatgatgggtctggtggcgcagctgcgcacccgcaaggcacggacggcgcagcccgctgcggtgcttgccaccgtgtttgcagacctgccggatgacgccattatcgagctgtaaaggaggcagaacgtgagcagtttgtttttgatgatcaccatcaccgaccgccgctctaccgacggctttttgcagctgtacaaaagccacggcgtaacggtaagtatgcgcaccgtaggctccggcacggcggtgcaggagacgctttccacccttgggctggaaaagaccgaaaaggcggtgctgctggctgtggtaaccgcagagagctggcagaagatccagaaggatctgcgccgcaaaatgcagatcgatgtgccgggcaccggcattgcgttcattgtgccgctgagcagcatcggcggcaaacgggcgctgatgttcctcaccgagcaccagccccttacatggaaggaggagagcaccttgaaggatacccgctatgaactgctgctggtggtggcaaatcagggctacaccggctccattatggacgctgcccgcaccgccggtgcaggcggcggcacggtgatccacgcaaagggcaccggcatggagggtgcagccgcctttctgggcgtggagctggtgaacgaaaaggagctggtgctcatcgtcagccgcaccagccagaaaaacaccatcatgaaagccattatggagggggcaaaccccaaggcgggtgctatcgtgttctcgctgccggtgaccgataccgccggtctgcggctgatggaagaggacgagactcagccggaagccgccctgtgaccccttaaaaattgatcccgatatccgcatttatcgccgaaggcttgataaatgcggatattttcgttatcatagtagaagatacttcaactataaacaaaggaagatgaagatgacgcaattaacacgcaaacaacagcagctcttcaacgcactgtccatcgtggtgggcaacgcgatgtatgcgctgactgtggtattatttctgatgccctccggcctgatcaccggcggtgccaccggtatcgcactggctttcaacaaggtcaccggactgccggtgtctgcagtgctgttcgtggtcaacgtggccatgctgctgctgggctggtgggtgctgggacgccgctttgctctgaacaccatggcaagcaccgtgctcagccccttttttatggcactgtgggagcggctgctgggcaatcttgtactgaccgatgatctggtgctgaacaccgtattcgcgggctttggcatcggcatctcgctgggcatcaccatccgcgccggtgcttccaccggcggcatggacattcccccgctggtgctgaacaagtggttccacctgccggtgtccagcaccatgatggttttcgactttatcattctggcggcgcaggcggcgttcagcccggtgcggcagtccctgtacggcgtggtgatggcgatcatctacacggtcgtgctggacaaggtgctcatgctgggcaccacccgcaccgaggtaaagatcatcagcgccaagtccgacgagatctgcgccgctatttttgcgcagctggaccgcggtgtgaccatcctgcacggcgagggcggctacctgcgggagccggaatcggtgctgctgagcgtcgtttccaaccggcagctgccaaggctggaaaagctggcgcacgccatcgaccccacctgctttatgatcgtgagccacgttaccgaggtaagcgggcgcggcttctcgctggaaaaggactatcaggcggaggggtaagcggatttccgcaaggctcttgcaaaactgccccggtttggggtatagtatagaggaacagtaggttatactgtatctcacccaaaacagaaaggaaaagctatcatgtttgatattttcaatatgctcaaaaaagaggcacacaccgcacccaagcaggtgacccgcgataccatcatcggcgacattctggatatggaccagaccaccgcaccctactttatggagatcgggatgcactgtctgggctgcccggcttcccgcggcgagaccatcgaggaagcctgcgaagtgcacggcgtgaactgcgatgagctgctggagaagctgaacacccatctggcagccaagaaggcctgagtgctgcccacactggatgcgcgtctgaccgcagcggcagagctggtgcgcccgggacagccggtggcggacatcggctgcgaccacggcaagctgacggcggtgctggcggcttcgggtaagtacccgaaggtcatcggggcagacctgcgccccggcccgctggcaaaggcaaaacagacgctggaaaatgcaggttgtctggaccgcgctgagcttcggctcggcgatggtctttctgtgttgtctgccggggaggtgggcagcatcgtgctggcgggcgtgtcggcacagaccacttgggagatcatcgaaaaagcgccgtgggtgtccgctgtgggcgggccgcgccttgtcatggtgcctgccacccgccacagtgagctgcgccgctggctgtggcagcacggctttgcccttgtggccgaccgcccggtgcaggccgcgggccgctggtatgcggtgatggcggcggagtacaccggcgaggtgacagagcccacctttacccagtgcctgctgggggataccggccgctggccggagggtgcgggctacgctgcgtggcagcgggcaaagctgccccggatgcggctgggcgtgccggacggcagtgcgcttgccgcagagatggatgccattctgaaagagggaaactgaaatgaccacggtacagcaggtatacgaagtaatgcagcggcttgccccgccggagctggcagagcactgggataaccccggtctgctggtggactgcggcggcgaggtgcgccgggtgctggtgacgctggacatcaccccggaggtggtggcagaagctgcggcaaagcagtgcacggtcattgtggcgcaccacccggtcatctttgacccgctcaagcggctgtgccccgccgatgtgccctatcagctggtgcaggcgggtatttccgccatttgtatgcacaccaatctggatgccgccgagggcggggtgaatgatgtgctggcggatcttttcagtatccggcagcgcaccgcctttgcagacggctgcggccgggtgggggaaatcgaccccatcaccgtgccggaactggcagcgctggcgcagtgcaaactggctgcgctgtgcaacgcgccggacaccggtgcagcggtgcaggtgaagtttgccgacaccggaaagtcggtgcaccggctggcagtcatcagcggcgcaggcggcagtctgtttgccgaagctcttgccgagggcgcggactgcctgttgaccggcgaagccaaccaccaccatgcactggatgccaagcggctggggctgtccctcattgcggcagggcattacgccactgagttcccggtgaccgccgccgtggcagctgccctgcgcgccgccctgccggagctggaggtgttggtgagcaccgagaaccgcgacccgtatacttatttataaaaagagaaccctttccgtcattgctgcgcaatgccacctcccccgaaagggggaggtctttcagcataaaccgaaaaactggcaacgccgcaggcgactgagagggttatagataaaacgaggtaaacactatggcactggatgccgcgacactggcgctgacggcagcggagctgaaagctaccctgaccgatgccaagatcgcaaaaatttttgaaccgacccgggatgagctggtcatcaccttgcgcacccgcaccgatacctacgccctgctgctgtctgcccgcagcggctctgcccgggtgtgcctgaccgaggagacctttgaaaaccccgagacgccgccctccttctgtatgctcatgcgcaagcacctgaccggcggtaggctgctggatgtgcacatggagccgggcgaccgtatcgtctactttgattttcagtgcaccaacgagatgggcgaccttgtgcgcaataccctgtgcgctgagctgatgggacgctactctaaccttgtgctggtgcagagcggcaagatcatcgacgccctcaagcgggtggattttgaggacagcgacgtccggcagctactgccgggcctgccctacaccacaccccccaagcctgcccgcccggattttctgctggtgagcagcgcatccatcgtggcagcagcctgtcagcgggagctgccggtggcggatgctctgaacaagacggtggccggcgtaggtccggtggtctgccgcgaagccgcatggcgcgcctttgacggcgagcacctgcccgccaacgagctgaccgatgcccagaagcgcagcctgatggcggcaatcgacgagctgaaggaactgcacgcacagggcggttgtccgtgcagcgtcaccgcgccggacggcaagccggtggagtataccttcttccgtccgcagcagtacggcgagcagtacaccatccgggagtggccgtccttcaacgcgatgctggagggctactacgccgagaaggaccgcgccgagcggctgcgcaccaagagcaaggagctgcacaaggcggtgcacaatatgtacgaccgcgctctgcgcaagcaggcagcacgacaggaagagcttgccgccagcggtaaaagcgaaaagctgcgactgtacggcgaactgctgtctgccaacctctatctggcgcaaaagggcatgaagagcctgactgtgcccaactggtacgacgaaggcaaagaggtgaccatcccgctggatctgcggttcagccccagccagaacgcccagaacttctttaagaactacaaaaagaagcagaccgccgcccggatgctggtggacctgctggcagagggcgaaaaggagatcgcctatctggaaacggtgctctacgaggtggaaagcgcctccggcgaagccgccctgaacgagatccgcatggagctgaaaaatcagggctacctgaaatactacaagcagcgggacaaaaagcagaagcctgcggactttctgcgctatacctccagcgacggctttgagatcctggtaggccgtaacaacgcccagaacgacaagctcaccctgcacaccgcccggggcaaggacttatggttccatgtgcagaaagcgcccggcagccatgttgtggtcatgagccggggcgaagacatcccggacaccaccaagcaggaagcggcggagctggcggtcatccattccagcgcctacaaggcgggcaccggtgccaaggtggcagtggataccaccgaggtgaagaacatctggaaagcaaacggtgccaagcccggcatggtgctgtacgaggtgtacaccaccgtctatattaccccgcgggatgggctggaagagcagctgaagaagaaatgatttgaactgcgcgccgcgtttgctttgcgcatggttcaaggaagaattattttaaatttgccaatcgggaaaatctgcggattttcccgattggctttttcacgggtagggtcgtggaggaaaacggcatttgcagcgcctgcttcctgcggaagcagcggcgctgcggggaaagcttctgcttgtcgcaagcgtgcagggacgctccgctgggccagaggcagggaggggtgttccgactcccccctccctacctctggactccacccaccccgcaacgggccaagggctgcacgcccttgacaatcctaaagaagaagtcgaagcacaaaaaagctagcgctgcgccagtcggcgctatcgctttaacgcttttttcgcttctccattaaaagcccctcagtcgctgcgcgacagctcccccgagggggagctggcacgcccagaagctttacacttcagctggaaactttctcgtcatgccaaaggctccctccccgaaggagctggcaaagccgacaggctttgactgagggagttctcctatataataggcataacctccgctcttcccgcccatactgatgctgcaaaggggagcgggggagttttccaccggcaaaaagcgctaagattgtgcatcttgcacagaaaatacggctgttgacaaaacagagaaaataaaaaagaaaaatcgtgattttctgcaaaaaacacttgccaaatagacgaagatgtgataaaatatctctcggctgcaaaaggcttgtgcgatacaagtcgtgcaggccagcgatatgcgttgatgcgggaggttgtcatccggcgatagctgcgatgggttatttccgcggagtatgtccgatcttagaaccgggcgaaaaaattactgacagcgatggaatacgttccctcggcagagaagttactcctctgcgaaacgggcggaaccaatgttcggatttgatttgctaatatgtttccgggagaactgccatgcggttcaccggtttttatagtgccaaatcgaggaacacccggaactgtgtagagcaatttatcggctcgcctagggcaaaaacaatttttcaggaggcgtaagcaatggcagtcaaagagaaaatcagaatccgtctgcagagctatgatgctcagctgatcgatgccgcagcagagaagatcgtggagaccgcaaagcgcaccggcgctcgcgtgtccggccccatccccttgcccaccgatcgtgaggtcgttaccgttctgcgcgctacccacaagtacaaggatagccgcgagcagttcgagagccgcactcataagcgtctgatcgacattctgaagccgtccaacaagacggtcgaggctctgatgagcctccagctccccgctggcgtggacatcgagatcaagctgtaaaccacacacgatcaaattcgatgccctcgtttcccgaggggtcatgttggcagtgacgtgcgctgccaaccaataacctttacaggaggaaaagaaaatggttaaaggcattatcggcaagaaagtcggtatgacccagctgttcgatgagagcggcaaggttatccccgtcaccgtcatcgaggcaggcccctgcaccgtcgtgcagaagaagactgtcgagagcgatggctatcaggctgttcagctgggcttcggcgaggtttccgccaagaaggtcaacaaggcagctgcaggtcacttcaagaaggcaaacgttgcccccaagaagaccctgcgtgagttccgtctggacgacgtttccgcaatgaacgttggcgacatcctgaaggctgacgtctttgcagcaggcgacaaggttgacgttgcaggcgtttccaagggcaagggctaccagggcgttatcaagcgctttggccagcaccgtctgcgtgagagccacggcactggcccggtggcacgtcatgcaggttctatgggcgctatttccaacccctctcgcgtgttccccggcaagcgcctgcccggccacatgggctgcgtgcgcgttaccgtgcagaacctgaccgttgtcaaggttgacaccgagaacaatctgatcgctgtcaagggtgcggttcccggttccaagggcaccatcatcaccctggccaacagcgtcaaggcgtaaggaggaaagctacaatggcaaagtttaatgtagtcgatatgaacggtcagcacgttagcgagatcgagctttccgacgccgtgttcggtatcaccccgaatgagaaggctgtccacattgctgtggtgaacttcctggccaaccagcgtcagggcacccagaacaccaagatccgcatggaagtttccggcggcggcaagaagccttggcgtcagaagggcaccggccacgctcgtcagggctccatccgtgctccgcagtggacccacggcggcgttgctctgggccccaagccccgcagctacaactaccacatcaacaacaaggtcaagcgtctggctctgctgagcgtcctgtccgacaaggctgccaatggcaacatggtcgtcgttgacaagttcgcttgcgacgagtacaagaccaaggctgtggtcgctatgctgaacgctgtgggcgccggcaagaagaacctgctggtcaacgagactgtcgatgcaaagttcgtcaagagcgctggcaacatcgccggtgtcaagaccaccttcgcaggcagcgtgaacacctacgatgtgctgaacgccgacaagctgatcatcagcgtcgacgcagctaagaagctcgaggaggtgcttggctaatgaaaaccgcacatgatatcgtcctgaagccggtcattaccgagaactccatggctggcatcgctgacaagaagtacaccttcaaggtcgctaccgatgctaccaaggtcgagatcgctcaggcagttgaagttctgttccccggcgtcaaggtcgctaaggtgaacaccgtctccgtccgtggccgcttccgccgtcagggtatgcacgctggttacaccgctgcatccaagaaggctatcgtgaccctgaccaaggactccaaggagatcgagttcttcaacagcatggtctgatagaacccgccgagggttcctctatggggatatgaccccgataataattcataagataaacaaaggagaatagcacaatggctatcaaaaagtatggccccactactccgggccgccgcggcatgaccgtcacggattacagcgtcctgagcaaggtcgctcctgagcgcagcctgctggagcccatgaagaagcacagcggccgcaacaacaccggtcgtatcaccgtccgtcatcagggcggcggcaaccgcaccaagtatcgtgtcatcgacttcaagcgtcagaagaccgatatccccgctaccgttaagactctcgagtacgatccgaaccgcagcgcattcatcgctctggtcgagtacaccgacggcgtcaagagctacatcattgctcccgatggcctgaaggtgggcgacgtggtcgtcagcagcaagtctgccgatatcaagcccggcaactgcctgcccttcgagaacatccccgtcggtaccatcatccacaacatcgagctgtatcccggccgcggcgctcagctggttcgttccgctggcaacatggctcagctgatggctaaggagaatggctacgctctggttcgtctgccctccggtgagatgcgcaacgtgcccgtgaactgcaccgcagtcatcggtcaggtttccaacatcgaccacgagaacgtcaacctgggcaaggcaggccgcaagcgccacatgggcgtgcgtcccggcagccgtggtaccgttatgaacccctgcgaccatccccacggtggtggcgagggccgcgcacctgttggtcactccggtcctatgactccctggggcaagcccgctctgggtctcaagactcgcaagcatcataagcgctccgataagctgatcgtgaagcgtgcaggtaagtaagagaggagtttaagacaatgggtagaagcattaaaaaaggacctttcgtccaggctgctcttatgaagcacgttgaagcgatgaacgcttccggcaagaagcaggtcatcaagacctggagccgcgcctccacgatcttccccgaattcgttggtcacacttttgccgtccacgacggccgcaagcatgtgcctgtgtatgtgactgaggacatggttggccacaagctgggtgagttcgttcccacccgtaccttcaagggccacactggtaattctaagtaatagagggaggaacacaacatggaagctcgggcaattcttcgttatgcccgcattagtcctcgtaaggtgtctatcgttatggacctgatccgtaacaagcccctggacgaagcgctggcaatcctgcagtacaccccgaaggcagcttgtgagccccttctgaagctggtgaagtctgcagccgctaatgcggaaaacaacttcaatatggacaagaacaacctctacgtcgctgagtgctacgtttgccccggcccgacgctgaagcgcatgatgcctcgtgcacagggccgcggctaccgcatcctgaagcgcaccagccacatgaccgttgttctgaaagagaaagagtaaggagggaaaacaatgggccagaaagtaaatccgcacggcattcgtgtcggcgttattaaagactgggacagccgctggtttgcctccaagaaggatttcagcgataacctcgtcgaggatcacaagatccgcactgagctgaaggctcagctgaaggacgctggcgtccccaagatcgagatcgagcgcactgtggatccttccacttccgctcctcgcgttaatgttaacatctactgcgctaagcccggtatggtcatcggcaagggcggcgaagagcgcatcgccctgcagaacaagctgaccaaggagtatggcaagaccgttatcgtcaatgtcatcgaggtgaagagcccctccaccaacgcacagctggttgctgaggacatcgctcgtcagctggagaaccgcgtcaccttccgtcgtgctatgaagcagtgcatgcgcaatgccatgagcccccgcgatcgcgcaaccgttcccgcaaagggcatcaaggcaatgtgctccggccgtctgggcggtgctgatatcgcccgcaccgagagctaccacgagggcaccatccccctgcagaccctgcgcgccgacatcgattacggctttgcagaggctgctaccacctacggccgtatcggcgttaaggtgtggatctacaagggcgaggtcctcaagagcgcaaagaccgctcctaagaaggaaggaggcaacaagtaatgttactgcctaagcgtgttaagtaccgccgcgttcagcgcggccgcatgaccggcaaggctacccgcggcaatgtggtgtgccagggtcagtacggccttgttgctctggagccggcatggatctcctccaagcagatcgaggctgcccgtgttgccatgactcgttacatcaagcgtggcggcaaggtttggatcaagatcttccccgataagcccgtgactgaaaagcccgctgagacccgcatgggctccggtaagggctctcccgaatactgggttgcagtcgtgaagcccggccgcgtgatgttcgagctggcagatgtcgatgaggcaactgctcgcgaggctctgcgtctggctatgcacaagctgcccatcaagtgcaaatttgttgtccgtgaggactccgtgaaggaggatggcaccaatgaaggctaatgaactccgcgaaatgcagaccgcagagctgaccagcaagctggcagatctgaaggctgagctgtttaacctgcgcttccagcatgccatcaaccagctggagaaccccggccgcatcgaagcagtcaagaaggacatcgcccgcgtgatgaccgttctggctgagaagcagtaaggaggttaaacgatggaagaacgtaatctgagaaagacccgcgtcggcgtcgtcgtgtccgacaagatggataagaccatcgtggttgccgttaaggatagcgtgcagcaccccctgtacaagaagatcctgaagcgtaccgtgaagttcaaggctcgtgacgagcagaacgagtgcggtatcggtgaccgtgttgagatcatggagtgccgccccctgagcaaggatgtgcgctggcgcctggtccgtatcgttgagaaggcaaagtaatctttgcccgctgctttgaacagtttgaaaggagatatctgatatggttcagatgcaaacttatctcaaagttgccgacaacaccggtgccaaggagctgatgtgcttccgtgtgctgggcggcacccgcaagagatacgcaaacattggtgacgtcgtggtctgctctgtcaagaaggcagcccccggcggctccgttaagaagggcgacgtcgtcaaggctgtcatcgtgcgcagcaagcatggcgtgcgccgcgacgacggttcctacatccgttttgatgagaacgccgccgttatcgttatggccgacaagaaccccaagggtacccgtatctttggacctgttgctcgcgagctgcgtgatgccggctacaccaagatcctgagcctggctccggaatcgctgtaaggaggttttaaaaatgaataatcttcatgttaaaaccggcgacaacgtgatgatcatcagcggcaaggacaagggccacactggtaaggtcctgcaggtcagccccgctgaaggcaaggtcatcgttgaaggccagaacatggttaccaagcacgtcaagccccgccgtcagggcgagcagggcggcatcgttaaggctgagggcgctatctacgcttccaaggtcatgcccgtctgccccaagtgcggcaaggccgtgcgtgtgggtcacgttgagaaggacggcaagatggttcgcgtctgcaagaagtgcggcgctgagctgtaagaaaggagtaaggaacaatggctcgtttgaaagaacagtatgtcaatgaaattgctcctgctctgaactccaagttcggttacaagagcgttatgcagatccccaagctggacaaggtcgtcatcaacgttgcctgcggcgaagccaaggaaaacgagaagatcctggaagcagttatgaaggatctgggccagatcactggccagaaggcagtcgtctgccgtgccaagaagagcgttgctaacttcaagctgcgtcagggcacccccatcggctgcaaggtcaccctgcgtggtgagcgtatgtacgagttcgtggatcgcttcttcaacgtggctctgccccgtgtgcgcgacttccgcggcatcaacggcaacggctttgacggccgcggcaactttgcctgcggcatcaaggagcagatcatcttccccgagatcgacttcgagaaggtcgatgcagtccgcggcatggatgtctgcttcgtcaccaccgcaaagactgacgaggagggcaaggagctgctgaaggctctgggcgctccgttcgcagagaacaactaagggaggagatttgtaaaatggctaaactgtctatgaagctgaagcagtctcgtcctgctaagttctctacccgtgcatacacccgctgccgcatctgcggccgtccccactccgtgctgcgcaagtacggcgtgtgccgtgtgtgcttccgtgagctggcctacaagggcgagatcccgggcgtgaagaaggcttcctggtaatttaccagagggctggatagaatgtcggatatccgccccggggcaaacaacttgtttcggggcggtatcattataaaacaaatgagagctaatctaaggaggttagtggcaaatgcagattactgatcctatcgcggacctgctgactcgcatccgcaacgctagcactgccaaacacccttctgtggagatccccgcttccaacatgaagaaggctatctgccagattctggttgacgagggctacatcaagggtatgcaggtcaagaacgacactgttcagggcaccatcgttgtcaccctgaagtatcaggcaaacggcgagcccgttattgccggcctgcgccgtgtgtccaagcccggcctgcgcatctacaccaactgcgaggatatgcccaaggtcatgaagggcctgggcaccgcgatcatttccacctccaagggcatcatgactgacaaggctgcacgtgctgagcacgtcggcggcgaagtcctggcctacgtgtggtaagaaaggggtaaaagacaatgtcgagaattggaagaaaacccatcgtcattcctgccggtgtcactgtcactgtcgatgaggcagcacacgctgtcaccgtcaagggccccaagggcagcctgaattccaactatcatcccctgatgaccgttaaggtcgagggcaatgaggttttggttacccgccccaatgacgaacccaaggcccgcagcctgcacggcctgacccgtaccaacatcgccaacatggtgaacggtgttgtgaacggctacgagaagaagctggagatcgttggcgttggtatgcgctgccagaagcagggctccaacctggtcatgaacctgggcttctctcatcaggtgaacgtccccgataccgaggactgcaccattgtgtggcaggatcccaaccacttctctgttaccggtatcgacaagcagaaggtcggccagtatgctgcagagatccgcgccaagaagccgcctgagccgtacaagggcaagggcatccgctacgctggcgaggtcgtcaagcacaaagaaggcaaggccggtaagggcaagaaataaggtaaggagtgaaagacaatggttaagcagatcgacaagaacgaagctcgtcttcgtcgtcatcgccgcgttcgcaacaagatcagcggcaccgcagcacgtcctcgcctggatgttttccgctccgccaagcacatctacgctcagatcatcgatgatgagcagggcgttactctggtgtcggcgtccactatggacaaggacttcaacggcaacggcggcaacgtcgaggccgctgctgagatcggcaagaaggttgcagcaaaggctctggaaaagggcatcaccgaggtcgtgttcgaccgtggtggctacgtttatcatggccgtgttaaggccctggctgatggcgcccgtgagggcggcctgaagctgtaatgagaggaggaaacacattatggctatgagaaaccgtgaagacgacggcatgatcaccaaggttgtgtctatcaaccgcgtttccaagactgtcaagggcggccgcatcatgaagtttgctgctctggttgtcgttggcgacggcaagggcaccatcggctacggcatcggcaagtccggtgaagttcccgaggctatccgcaagggtgaggccgctgccaagaagaatatgcacaaggttgccctgaagggcaccaccatcccccacgagatcgtcggcaagtacggcgcaggcgctgttctgctcaagccggctgcacccggtaccggtatgatcgccggcggccccgtgcgtgccgtcattgaggctgctggcatcaaggacgttcgtgcgaagtctatgcgttccaacaaccccatcaacgttgttgctgctacctttgcaggtctgtgcggtctggtcagcgccgagtctgtcgctgagaagcgcggcaagaccgtgaaagaaattctgggttaaggaggtaactaaccatggcagataagatgctcaagatcgagctgaagaagagcctgatcggccgcggcgctaagcagatcgctaccgctgaggctctgggcctgaagaagccgggcgacgttaccgttcagcctgacaacgccgctacgcagggcaagatcgcaaagatcggcttcctgctcagcgtcaccgaagcctaatagcagggggtatacgcacaatgaagcttcatgaattgcacgccagcaagggcgccaacaagcctgtgacccgcaagggccgcggcattggctccggcaatggcaagactgccggcttcggcagcaagggccagaaggcccgttccggcgtgaagcacgctggtttcgagggcggtcagatgcctctggcacgccgcctgcccaaggttggctttaacaacatctttgctacccagtacgccatcgtcaacgtggctgacctggaggctgctttcaatgccggcgatgtcgtcgataccgaggctctgaaggctaagggtctggtcaagaagaccctggacggcgttaaggttctgggcaacggcgagctgaccaaggctctgaccgtgaaggccgcagcctattccgcttctgccaaagagaaaatcgagaaggcaggcggaaaggctgaggtgatgtaaggtgttccagacattccgtaacgcatggaagatccccgagcttaaaaatcgtcttctgttcacgctggcgatcctcgtggtttaccgtcttggctgtgccatccccgtgccgttcgtttccggctctgctctgacgcagatgtttgcaaacggcgatatgctctcgtacctcaatatgatgagcggcggcgcactggcaagatgcacgctcttcgcgttaggtgtgacaccctatatcaacgcctctattattgtgcagctgctgactgtggccattccttcgctggaaaatctggcaaaggaagcggacggccagcagaagctgcagcagatcaaccggtatgccggtgccgtggtcgcactgatcatgagcattggctactacttcgtgatccgcaatatgggtgcactgaagtatgtttccggcgcagtcggcgtgttcgccgctgtggtcatcatcgctaccttcgttgcaggtgctcagctgatcacctgggcgggcgagcagatcgatgacaagggtatcggcaacggtgtttcccttctgatcttcgcctccatcgtttccaactggtcctcgctgtacacctctgtgacgggtctgatgacccgcgcagcggctggcgagcctcagttctatatcctgctgcccgttctggtaattctggcactggtcgctgtggtctttgtggtggtcatgaccaacgcagagcgccgcatcaccatccagtacgctaagcgtgtggtgggtcggaagcagatgggcggccagaacagctacctgcccctgaagctgaacatgagcggcgtcatgcccatcatcttcgcttcggctctggtgtccatcccgggcaccatcggcagctttttgcagatcgatcagaccgctcacccggtctggtatgcgttcttccataccttcaactacacctcctggctgtacgttgtgatctacctgctgctgatcctggcattcaactacttctatgtggccatccagtacaaccccgttgagatcgcaaacaatctgcgccgcaacaacggctcgatccccggcttccgtcccggtaagccgaccagcgatttcatcacccgcaccctgaacaagatcaccctcatcggtgccatcttcctggctgcggtggctgtactgccgatcattctgggcaacctgaccggtatgagcattcagctgggcggtaccagcctgctgatcgtggttggtgtggcactggataccacccgcagcctcgatagctttatgaccatgcgcaaccacaagggtttccttggctgatctgaagcaataaagatgtaagaaagcactggaaaggagagtacgctcatacttttcagtgcttttttgcttttgtacgtatgtttctatcatgtggcatataagaaaggaagcgatcctatgaatctgatcctgttgggcgcacccggcgcaggcaaaggcacgcaggccgaaatcatctgcgcaaagctgaacatcccttccatcagcaccggcaacatcctgcgcgctgctgtcaaggagggcaccgagatgggtctgaaggccaagagctttatggacgccggtgctctggtgcccgatgaagtcatcatcggcattctgaaggagcgtctggcacaggctgactgcgccaacggcttcattctggacggcgtgccccgcaccattgcgcaggcagaggccatcgagaccatgggcatccgcatcgacaaggtgctggaactgcaggttgaggacagcgtgatcgtggagcgcatgagcggccgccgcgtctgcgagaagtgcggcgcaagctaccacatcctgaacaagaagagcaaggtggagggcgtctgcgacctgtgcggcggcaagaccgtcatccgcaaggacgaccagcccgcaaccgtgctggatcgtttgaaagcctaccatgagcagaccgagccgctggtggagttctaccgcacccgcggcaagctggcagagatcaagttctgcccctccatcgaggagactacggctgaagtcatgaaggctttggaggcataagcgtgatccagatcaaaaatgcaaaagagctggacggtatgcgccgggcaaacgccctgagcgcagctgccctgaagtacggcggagagcacatcgaagcaggcatgaccacttgggagctggacaagctgatctacgacttcatcgtgaagcacggcggcatccccaacttcaagggtctgtacgggtttcccggcacagcctgcatcagcctgaacgataccgtcatccacggcatcccctctcatgatatcgtcatccgcccgggtgacatcgtgagcatcgacaccggtgccaaggtggatggcttcaacggcgacaacgcctgcacctacgcggtgggtaaggtggatttggaagcccagcgtctgctggaagtgaccaaggcttctctgtacaagggcatcgggcaggccgtggcgggcaaccgcatcggcgatatcggctacgccgtgcagagctactgcgaggacgcgggcttctctgtggtgcgtgactttgtgggtcacggcaccggcaaggaactgcacgaggaccccgaggtgcccaactacggccatcagggccgcgggccccgtctggtgcccggcatgaccatcgccattgaaccgatgatctgtcagggcgactacaagatcaagcagctcagcgacggctggactgtcaagaccaaggacggcgggctggctgctcactttgagcactccatcgccatcctgaaagaccgtaccgagatcatgacccgcagctgggatgacccggattttgacccggccaccttcagcctgaagtaagcaaccattaaaaggagccgctgcacagacgatgtgcggcggcttcttttgccttagcgggctcgccctctcagtcaaagcctgtcggctttgccagctctcccaaagggagagtccttggcataacggtaaagtttccggcacagtgcaaaggcgtccccttgggggagctggcgaacgtagtgagcctgagggggtggcttcagcactgccgaaagcggcactgcaaatgtcgtctcccgctacgacccctctgcgtgaaaatgcgtttggagcgctccgcagagcgcgacaaacgcaaaaataaaaataatccttcctctgattatgcccagagcaatgcggagggcattttaaatcgttttgtctgtctgaaaaggctgtctgcggagaaacagcagacggccttttccgctccttcaccctgcaatttgtgcaattgtgacaagttttcgtgaaaaagtttcaccttcacggtggagaaccgcgaaaggaggacgggacggaaaagagcttttatacagaataattttttatcggaaatacggaaaaaacctcttgcaaattgacaacaaaaggtgtataatctataaatggctgtggaagccagatacttcctcgacggacaggcttagtctgcccgttttgcggattttgtgccgcaggagatgaagtatgtggcgctcatcgccacctgtccgtctggggatcggcgtgaaaactcttgaaaagagaagcggcaaactgcacaaaaacgggcgcaggcacggaagaatgcagtgctttctgtttttaggggcgggagcaccggtgctcaattatgacaaactgagcagatccaatgaggaggcaaatagcttgtctaaagaagacgtcatcgagatcgaaggcattgtgcgtgaagccatgcccaacgccatctttaaggtggaaatgttgagcgaggataagaacaccgggaagctcactcccagcggtcacatcctcttagcgcacatctccggcaagctgcggaccaatttcatccgtatcctgcccggggacaaggtaaccgtggaaatgtcgccctatgatctttctaagggccgcatcacctggcgctccaaataagcgtcagggcatcaaccaaaaggaggttcaacatcatgaaggtcaagccttccgtgaaacccatctgcgaaaagtgcaaggtcatccgccgcaaaggccgcgtgatggtcatctgccagaaccccaagcacaagcagcgccagggctaattcgggcgcctgggggtcaagtgcgtagagtcccggcgcagaccccgacactgacatgggatgatttttggaggaaactactatggcacgtattgccggcgttgacctgccccgcgagaagcgcgttcaggtgggtctcacctacgtttatggtatcggccagaccactgctaacaagatcctggaagcaactggcatcaaccccgatacccgcgtcaaggatctgactctggacgaagaggctaagatccgtgactacatcgatcaggcaaacatcctcgttgaaggcgacctgcgccgcaacgtggctctggacatcaagcgtctggtcgagatccagtccttccgtggcacccgccatcgcaagaatctgccctgccgcggccagcgcaccaagaccaatgctcgtacctgcaagggtcccaagcgcactgtcgcaaacaagaagaagtaaggaggatttgagaaatggcaagtgcaaataacgccaagaagggcgcaaatgtccgcatgaagcggaaagagcgcaagaacattgctgctggtcaggctcacatccagtctaccttcaacaatactgtcgttactatcaccgacctgcagggtaatgcagtgtcttggtgctcctccggctccctgaacttccgtggcagccgcaagagcaccccgttcgcagctcagtccgctgccgagaccgcagctaagactgcaatcgagcacggcatgaagactgttgaagtttacgtcaagggccccggcgctggccgcgagtccgctatccgtgcgctgcaggctaccggtctggaagtcaccctgatcaaggacgtgactcccatcccccacaacggctgccgtcccccgaagcgccgtcgtgtctgatcgaaggaggaaattgaattatggcaaagaatacgcagcctatcgcaaagcgttgcaaggccctgggcatttctcctgcggtcatgggctatgcaaagaagaataccacccgcaactccaacggcaacgtccgcaagaagcagtctgagtacgcatctcagttgaaggagaagcagaaggtcaagttcatctacggcgttctggagaagcagttccacaacgcttacctgaaggcagagtctcgccccggcaagaccggtgagaacctgctccagatcatggagtgccgtctggacaacgtcgtgttccgtctgggctttgctcagacccgccgcgacgctcgtcagctggtgtctcacgctcacttcaccgtcaacggcaagaaggtcaacatcccctcttaccaggtgaaggctggcgatgtgatcgaagtgcgcgagtccagccgcagctctgcaaagtttgcaaagctgaccggtgccgaggctcccgtcgtggcactgcccgcatggctgaaccgcgagaccggttctctgaagggcgttgtcgctaagctgcccgagcgcagcgatatcgactacgaagtcgcagagcacctcatcgtcgagctgtactccaagtaatccattaagaaggcagtgccttccttctggatggtacgctttcgcattcttttttgaaagaattcaataatgggccggtggaaacaccggtttgacaaggagggcatagatatgatggagattgaacgtcccaagatcgaaacggcaagcctgtccccggacggccgctacggtaaattcgtggcagaacctctggagcgtggctttggcatcacactgggcaatagcctgcgtcgtgtgcttctttcctctctgcccggtgtcgccgtgaccagcgtcaagattgacggtgtggtccacgagttctccaccattgagggcgtcaaggaagacgttaccgaaattgtcctgaacctgaagggtattgctgcaaagctgtacaccgatggtccgaagacagtgcgtgttgaggcagttggtccctgtgaggtcactgctgacaacatcaagcagggcgacgacatcgaaattctgaaccctgagtggcacattgcaactctgggcgagggtgccaagctcgttatggagctgactttcgacaagggtcgcggctatgtgcccgcagagcgcaacaaacaggctatcatcgagaagaacgatatcaacacccttcccgttgacagcatttacacccctgtgctcaaggtgaattataacgtcgagagcacccgtgttggacaggccattgattacgacaagctgaccattgaggtttggacggatggcacgatcaacgcacaggaggccgtttctctggctgcccgtgtgctgaccgagcacctgaacctgttcgtcaacctgtctgacgaggccgccggcgctgagatcatggtagaaaagaccaacgacgacaaggagaaggctctggagatgaccatcgaggagctggatctgagtgtgcgttccttcaactgcctgaagcgcgcagggatcaacacggtggaagatctggtcagcaagagcgaggacgagatgatgaaggtccgtaacctcggtcgcaagagcctggaggaagtcatggcaaagctggactccctcggcttcaagctgaacacggatgacgaataactaaaataatttaaggagtgaaacgggatgcccggtaccagaaagctcggtagaaccagcgacagccgcaacgctatgatgcgcgctatggttacctacctgttagagaatggcaagattgagaccactgtcactcgcgctaaggacgttcgttccatggccgagaagatgatcagccttggcaaggccagcgacctgcacaccaagcgtcaggtctacgcctacatcaccaaggaagatgttgcaaagaagctgtttgacgagatcagccccaagtacgctgaccgcaacggcggctacacccgcatcatcaagatcggcgctcgccgcggcgatgcagctgagatggcagttctggagctcgtctgatcctgctctgactgtttgatacagtaaccaaagaaaccattgcacagtttttgtgcagtggtttcttttttgtttatatgggctaccccctcagtcgctgcgcgacagctcccccaagggggcgcctttcggtgctgccgcaaagtttcccgccaccgcgaaaagccgtccccttggggaaggtggcatcgccgtaggcgatgacggaaggggtaatcccccgccgcgcattccaaatcgttctccgcgtatgcccaccccccttttttgtgtccgcaaagtgtggtatactgaaaatagctttttatgcccggaaggaggttgaccggtatgaacagaacccacaggctgcggctggtgctgtgcacgctgctgtgctttgtgctgtgcagctgtcagacagtgctgccggccaacgaaaaggcacaggtagaggaactgctgcgtgccccgaaactttccggcgattatggcgcgctgcaaactgccctgaacgactggctgggtgagagcgcccagctgaaatatcccattcagggcgagctgctttctccctttgtgctgcaggatctggatggcgacggccagcaggatgcggcggtgctgtataccaccgcccagacggccaacgtctgcatagccattttgcagcgggatgatgccggaagctggcaggtgcgccagagcgtggaaggtcttgccgaaacggtggagaacgtcagccttgctcagctgcaggatacagacagctgccagctggtggtgggctataccgctgcccagaatgaccactatctggcggtgtactcttatcaggacggcactctgtccaccattctcgagcagcagtacgagcagtatctggtggaaaatatcaccggcggcagcagtcaggatctgatcctgatgtccacgcaggaggacggcagtgtgcagatcgagctgctgaccgcagaccgggagggcagcttccggcaggtggcggtcaacggcctttccgcagataagttttccggctgcgcttcggtggcggcgggtgcaggcgcagacgggcggcattatctggtgctggacggctggaccggcatttccggcaataatctggcttcggtgctgttgtgctacgacgagaacagccagcaaatggtgcccgccacaaggatcagcagccagcggctgtataatgcttctctgcgcaacgtgcccacgctggtcagccgggacttggacggggacggcatcgtggagatccccacccagccggacgaggcgggtctgctgaacctgagccagagccgccgcatggattttatcgtctggatggactacaccagcagccacccggaaaaaagctttggcctgctggacgaggagaccaactgttatatcgagctgcccgccgagtgggagggcaacctgaaactgaccgacagcgaggaatatgacggcgcagtggagctgcgcaccgtagacgaggatgagctggtgctgacggtacggctggcaaggacctcggccaattctaccggctggacaaggctcggcgtggtggcgtcccgccagctgcaggccagaatgggcccgggcgttttgcttgccgacacaaactatcgcctttccaaggcgttgtatctgctgaattaaggaatggaggatgctgcatggtacgagtgcttgttgtagaagatgaaaccaatatccgcgatatgatcgccctgaacctgcgccatgcggggatggaggtggtggaggctgaaagcgccgaagccgccctgccgctgctggcgcagaaacccggctgcgatgccgccattctggacgtgatgctgccgggcatgaacggattctcgctgtgcgagaccatccgccgcaccgaccagcagatcggcatcatcatcctcagcgccaaggggcaggagcaggataagatccgcgggctgtccatcggcgcagacgattacatgaccaagcctttcagcgtcagcgagctgctggcgcgtgtggaggcgctgtgccgccgcgtgatccgcaccaaggaaggggagagccgggagaataccccgctgggcactttgaccagcggcgagttcgtgctggacgagaaccgccgcgtgctgctgaaagccggtcagcccatcgagctgacgcaggtggagttccagatcatggagctgtttttccgcaacccgggcaccgcgctggtgcgtgaaaagatcctgaaaggcgtctggggcgagaactacttcggcgacgtaaagatcgtggatgtgaacatccgccgcctgcgcatgaaggtggaggacgagcccagccaccccgcccacatcatgaccgtgtggggctacggctaccggtgggaagaataaaacctgccccctcaggcgcgcttgctataaaaactcccccagtcatcgctgcgcgatgccagccccctctgggatggggcctttggcatggcggaaagctttccggtcaaaacgtaaaccttccggctgcgccagaggctccctctccgagggagctggcaaaaccgtcaggttttgactgagggagttcgttctaaatctcaccgaaaggaggacactgttatgcgaagcggtatcacccgccgctggctgcggggcaatctgctcatcaccgtactggtagtgctgctggccgaagcgatgtttttgtacagctatacccgcagctactacggcagtgtgcagcagatcatgtaccggcggttctcctcggtgaccggtcagctgaaaatgtataccggcgataccgcccagagcgcggcggtcagccgcagtctggcgctgcggcgcatggtggaacagtttgccgataaggataaatacgagttcatgctgctggacagctacggcagcgtgatcgcctcctccagcggtacggacgcggagggcatcgtcagcagcagggactttgaacaggcgctcggtgcgccggatggtctgggcgtggcggtgtaccgcacccagtccggcgagatggtcatggcggcctgctcgctggtgccctacgacgccgaggacgtggcggctctgcggctggtcaccagtctggcgctggtggagcggcaggtcaaaaacgccgtcatcgtcagtgtgttcattgcggtggcgatcctgctgttcacggtcatgtccggactgtactttgtgcggggcatcgtggtgccgctggggcaggtggagcgcaccgccgccggcatcgcccggggcgaactggacgtgcgtctgcccctgaccggcgacccccacgacgaggtggaccggctgcgcggcactatcaaccagatggctgagggtctggaagaaaccgagaagatgaagaacgagttcatcagttcggtgtctcacgaactgcgcaccccgcttacctccatccggggctgggtggagaccttgatgaccttggacgaccccaccgacgagaactaccgcaaggggctggagatcatcaacaatgagaccgggcggctgaacaatatggtggaggagctgctggatttcagccgcctgcagaacggacgcatccgcatggagtgccgcccgctggacttggtggcagagctgaccgatgcggtgctcttctgtgaagcacgcatccggcgggagggacttctgctccactacaccgagccggaggagatgatccctgtctacgccgacccggaccgtctgcggcaggtgttcatcaacattctggataacgccatcaaatactccgcccccggcgggcgcatcacggtcaagctgtgggcaggggagtacaaagcctttgtggagatcatcgatcagggacgcggcattccgccggaggatctggaaaacgtaaagactaagttctacaagggcagcaactcggtgcgcggcagcggcatcggtctggcgctggtggattccatcatgaccgcgctggacggcacgctggatatcaagagcaccctcgggcgcggcaccgtggtcaccttgggtctgccgctgtaccataaggcgtgagcagcgccataaaaagcaattttctggatgaaggcttcccccggacgggggaaggcttttatctcaggtcaagtggtatcatttgattttcgtacagcagtgccacggactacagattttgtcacatttgtgtgctagaatgagctttgctcggggatatgccccggataaaatacaaaaaagaccgccctttgcccaaagcggcaggggcggatatcgggagaaaccaatgaatcaacctaaacaggaacgctttaagaccagcgtgggcgggcaggcactgatggagggcatcatgatgcgcggccccaaacagatgtgctgcgctgtgcgcaaaccggacggcactattgagaccaaactcgaccccacccccacccacggggtgtggacaaagatcccgctggtgcgcggcgccatttccatgatcgagagcatgatcgtgggctaccgctacatgatgtactcggcacaggtgagcatgggggacgattacgaccccgccgaggaggagaccgcctttgaaaaatgggtgggagagcatctgggcgagaaagccgagaacgcgctgctgactgtggcggcggtgctgggcggtctgctggcgattttgctgttcaccgtgctgcccaccttccttgtgggcggggtgaaccgtctgctgccgctggggcgctggggcaaggtggtgctggaagcggtgctgaaggtggccatcttcctgacctatatggtgggcatctctaaaatgaaggagatccaccgggtgtttgaataccacggcgcagagcacaagaccattgcctgctacgaggcgggcgacccgctgaccgtggagaatgtgcgcaagtatacccgtttccatccccgctgcggcaccagcttcctcattttggtggtcatcgtcagcgtgtttttgtacagcgtgctgccgtggggcagtattggcctgcgggtggtgtgcaagctgctgctgctgccgctggtcatgggcatcagctacgagctgctcaagtggtgcggccggtcggataacattgctacccgcatcatccgtcagccgggcatctgggtgcagcatcttaccgtctttgagccggacgacagcatgatcgaggtagccattgccgccatcacccccgtgctgcccgaaaacccggaggaaggcaaatggtaaacgaagcaatgctcccccgcacagcggtgcgggaggtggaacagcggctgaccgccgcaggctgcccggacgcggattttgacgcgcgggagctgttccggctggcgaccgggcgggacgtgcggctttccgaccatccgctgaccgcagagcaggcggcggcgctggaagccctttgcacccgccgcgccgcgcgggagccgctgcaatacctctgcggcagctggagctttttagactttgagctggcggtaggccccggggtgctctgcccccgggcagataccgaggtggtggcgcaggccgccgccgagacccttgcgggcatcgaatcgccccgggtgctggacctctgcgccgggacaggctgtctggggttgggggtcaagcgcttttgtcccgccgcgcaggtgacctgcgtggaaaaaagcccggcggcctttgtctatctggaaaagaacgcccgctgcgctctgaccgggcagggcagacagaccgagaacgtgctggaaccctctgcccttgaacaggcagatgtcccggccttggactggggcccggcgctgaacgcgctgcgggcaggcaaaaagcccgtctacgcggtgcagccggtgcagggcgacctgttcacctactgggaaaccctgccggaggggcagctggaactcatcgtctcgaacccgccctacctgaccgccgccgagatggagcagctgcagcccgaggtggcgcaggagcctgctatggcgctggaagccggggaggacggccttgtattctaccgggcgctggcgcagcactaccaaaatgcgctgtgccccggcggggcgctggttttggagatcggctggcagcagcgggaagctgtaagcgccctgctggcagagaacggatgggcagatattcgctgcatacaggactttggcggcaacgaccgctgtgtgatcgcccatcgcgcaaaataaattggaaaaacaaacaacttcttgttgtaatattttgattttgtgttatactaagaaggaaagcgaaggacagcccgccctctgcgggcccaaaggataaaaggagcagcaggctatggcaaaaaatcagaacaacaacgttgcaccggccacccaaaagaccgagccggaagccaagaaggacgcgctggctacggcgctggcgcagatcgaaaagcagttcggcaagggtgccgtcatgaagctgggcgacaacgcctccatgcaagtggatgccatttccaccggcagtctggggctggatctggcgctgggcgtgggcggtgtgccgcgcgggcgcatcatcgaggtgtacggcccggaatccagtggtaagaccacgctggcactgcacatccttgccgaagcccagaagaagggcggcgaggtggcctttatcgacgttgagcacgcactggaccccacctatgccgaggcgctgggtgtggatatcaacaacctgctggtcagccagccggacaccggcgagcaggccatggagatctgcgaagcgctggtacgctccggtgccatcgacgccatcgtagtggactcggtagccgccatggtgccccgcgccgagatcgagggcgagatgggcgacagccatgtgggtctgcaggcacgtctgatgagtcaggccatgcgcaagctgaccagcgttatcggcaagaccaacacggtctgcgtgttcatcaaccagctgcgtgagaaggtgggcgtcatgtacggcaacccggaggtgaccaccggcggccgcgccctgaaatactacgcctcggtgcgtatcgacatccgccgcgtggagggtctgaaggactcctccggccagttcatcggcaaccacacccgtgccaagatcgtcaagaacaaggtggctccgccgttccgtgaagccgagttcgacatcatgttcggtgagggcatctccaaaatgagcgagctcattgacgtgggcgtcaagctgggcatcgtgcagaagagcggcgcatggttcaactacggcgatatccgtctgggtcagggccgcgacaacgccaagcagttcctgaaggataaccccgagatcgccaatgacatcgagggtcagatccgcgccaacgccgataagctgtacgccacccgccgtccggcaggccgcgccgcagccgccgcagcggagaagcccgccgaccctgccgccgcaaaagagccggtggtcaaggcacccgcccgcagcagcgaaagcgagctggatatcatggtggaggactaaatggccttctaccgccgccgaccccgcccggatgcggaaaagtgtgcagaccccgccaaggcgcgggccagtgcgctggaaacgctggccgggcaggaggtctctgccaatatgctgtatgagcggctgtgccgccgctataccgagcaggctgctgctgccgctgtggcggagatggtgcagctggactatgtgaacgatgcccgctacgcagaagcacgggcgcacagcctgctggctgcccgcaaaagccgccgcgccgccgcccagagcctgcgccagaaggggcttgctcccgccgaggtagcaggtgcgctggaagcggtctacgccccggaggacggcggcgacgacccggagctggaagccgccgccgcgctggtggacagccgctaccgcaaaaagcttgctatcggccgtcgcgaccttgtggtggcggcgctgcagcgccgcggctttgcctacaccactattaaagaagccatccgcagggtggaggaggaagggtagaggcagtagacgggagatgttctcttttgacaccaaaagagaaccagaaaagtgccagcgatttcgacgcgctggagccacgaaaaaggggctgctcgccccttttaaccccaaagaagtgggctacaccggaaaaaactgaagattcacgcctgttcggcgtgaagatcttttaaccgttttttccggctccgccgatttgaagcccctcagtcgctgcgcgacagctccccccgggggagcgggcacgcccggaaactttcccgtcatgccaaaggctccctcccagagggagctgtcaaaaccgacaggttttgactgagggagttcgttctaaacccctcctgtgaaaatagcgtttggagcgctccgcaaagcttgtcggggcaaagcccctccatctgctaacgcagactgctctgccgcttaaaagccccactggggctttcattgctgcgctgcgctccgcaaacgcggtcactccaaacgcgaaattataaataattcttccgctgatgatgcgcaaagcgaacgcggagcgcattttaaatctttaaatcgtaaaaattcaaaagcatccctcaaaagagaaagagagtatcatcccttatgaaaattgcgtgtatttcccttggctgcccgaaaaatcaggtggatctggatgtgatggtgcacatcctgctgtctgccgggcacgagaccgtggccgatctggctgaagccgatgtcattcttgtgaacacctgcggctttattgagagcgccaagaccgaagccattgaaaacattctggaagcctgcgcctacaagcagcagaacccgaacctgaaggtcatcgttaccgggtgcttggccgagcgctaccgaagccagatcgaggaagagattcccgaggtggacgctgttgtgggctgcgcctccaacaaggccattgacaccatcgtggagcggctgttccacggcgaggatcatctggaaagctacggcgccaaaaaggacttcccgctgggcggcaagcgcgtcatcggtacgcctgcccactatgcgtacttaaagatcgccgagggctgcaacaaccgctgccattactgcgctatcccgggcatccgcggcccgctgcacagccgcgatatggccgactgcgtagccgaagcccgctggctggcgggtgagggcgtgaaggagcttattgttgtggcgcaggaccccaccgcctacggcgaggactggggcaagcccggcagcatctgtgagcttctggataagctgaacaaggtgccggggctggaatggatccgcatcatgtacgcctacccggagcgtatcaccgatgaatttattgccgccatgaagcgcaacgagaaggtggtgccttacctcgacctgcccatccagcactgcaacgataccatcctgaagaacatgaaccgccgctccacccgtgcggaactgctggaggtcatcggcaagctgcgccgtgagatccccggcatcaccctgcgcaccaccctgatcgcgggcttccccggcgagaccgaggagcagttcgaggatctgtgcaactttgtcaaggaggtgcagttcgaccgtctgggctgctttgcctactctgccgaggagaacaccgtggccgccaagatggacggccagatcgagcaggaggtcaaggacaagcgtgccgagctggtgatgcagatccagaccggcatcatggcgcagaagcaggctgaaaaggtaggtcagaccgtgcacgttctgtgtgacggcatcgacgaggaaaacggcctgtacctctgccgcaccaccggcgatgcgccggaggtggacggctgcgtctgcgtttccagcgaggaaccgctgtaccccggccagttctatgatgtgctggtagaggacagcgacctttacgatctgtatggtacggtcgtaaaataacgaattggaggataaaacctatgaatctgcccaataagcttaccctgacccgcatcattctggtgccggtgttcatgatctttgtgtctctgactggtctggacggcatcgtggacggtacattcaacgccgccttctacctgctggcaggcatcgtgtttgccgctgccagcttcaccgactttctggacggccatctggcacgcaagtggcacatggtcaccgatttcggcaagtttgccgacccgctggctgacaagctgttgaccaccgtggccttcatctatatgctgcgggatggtgtgtgcagcccggtggtgctgtgcatcattctggcgcgcgagtttgcggtgtccggtctgcgcatggtagccgccggtgccaaggacggcaaggtcatcgccgccaatatgtggggcaaggtaaagaccgttttgcagatgctgagcatcatcttctacttcttcggcactgccctgagctactgcggcacggtggaaagcgtttccatcgtggtggtgatctccatcgccctgtgctggctggtggctgctgtgaccgccatctccggcatcaagtacctgtgggataaccgcagctttatcaacactgcaaaataaaaatgtggaaaacaaaggccgctgcacctcaccgtgcagcggcctttttggttgtgttggacgatttggaatgcgctccgcttcgctctgcgcataatcagtggaaagatttttttaaatttcgggtttcagaaaagtctgcggacttttctgaaacccattttcacgaagggggtcgtgaaggggaacggcagatgccgagataccccttccgtcttgccgcttcgcgtcaagccaccttccccaaggggacggctgaactccctcagtcaaaacctgacggttttgccagctccctctgggagggagcctttggcatggcgggaaagtctccggttttgccaagggccccatctcagagggggctgtcgccgtaggcgactgggggagttttatcccccgccgcgctgcgctttcgcagaaagcggcgcggcagctgccgttttcctccacgacccctcccgtgaaaatgcaatgccggagcgtccgcagacgctccggcattgctctattaaaaataatttttccgctatttatgcgcagagcaacgcggagcgcattaaaatcgtttgcgcccggcaggtgcactgtcaggaaagcaccgcgctttcctccaccttgtccagcacagccagctgcaaggcgttcagcatactgcgctgtgcgccataggtgtcggcgtaggagctgttgacactgtcgatctgttcctgcgtgggggtgatatccagctgttccgcaatggcctgaaagaccagatcctgcttggccagatgctcaaagtaggcgtcagaatctgccagcatcgcgttggcatcggcgtagcccttggcctgtgcgtaggcgtccagctccatgccgtactgggtagcaagctgagagtgatagttcaggaacatacggatgtagtagctggtgatctgggtggggatctccttgaaggtggcgttattgagcagatagtccatcacggcgttgtccagattgttggcgtacagggcgctgtcaaagtactggcgcagggcgtctgcggtgtgcagatcgtcgctggcggcaaagttcgtctccacccactcgtcggtcagggtgggcacaacgctctgggtgatggcgttcagtgtcacgctgaacacggcttccttgccgctgagggtgatggtgttgccctcggcgtcggtggagtcgccgtagccctccgggaaggtaacagtcacatcaaaggtgtcaccgatattgtggccgatgatctgatcctcgaagccgtcaatgaaggtgtggctgcccagcgtcaggtcatagccggtggcggtgccgccggtaaaggctacgccatccaccgcgccggaatagtcgatgttcacagtgtcgccgctctgggctgcccggccggtgatgttctgggtggtggcgtactggttcagcaaagtgtcgatctgggtctggatctcggtctcggtgggctcaatgtctgccttggaaagcggcagcgcggatacatcctccggcaaggtcacatagtccagtgcgcggatgccggtccagtggccgttatcgtccagtccctcggagtaatcgaagctggaataatcgaaatccgacaccttgccgtagacggacacgcttgcgccggatgcggcagaggatgccgtggtgccgctctgctttttgagcagcgtaaagcaggccgcagctacgcacagcacagcagccaccgcgcacagcacacacaacaggatcttggtaatgcgtttcaaaagagatacctcctaaaaatagcagaccgttttcacggagaatgcaaatatcataccatcctattataacggaaaaatgcgaaaagaaaagatttttgctaaaattccacaaatgccgcccggcacaggtatcacttttgcccgcttttgggcgggaaatgccgcaaaaccggtggaaatacccgggcggttctgttacaataaaactgtatgagtgcgccctctcagtcacctgcggtgacagatccccccttttgtcgctgcgcgacatcttcccccggagcgggggaagtctttcctcaaagggagagcccttggcaaaaccagaaagtttgcgtggactgccaaggcctcccactttgggggaggtggatgcgaacgcagtgagcagacggagagggcgaggatgcgaaccgtaacggaggaaaattaaatggattacaataaagcagctctggaaatgcacgagtcccacaagggaaaggtgggcatcgtgagcaaggtggaggtcgccacccgcgacgacctgtccaccgcctacacccccggtgtggccgagccctgccgcaagatcaaggaaaaccccgacgatgtgtataagtacaccttcaagggcaacatggtggccgttgtctccaacggcactgccgtgctgggtctgggcgatatcggcccggaagccggtctgccggtcatggagggtaaggccgtgctgttcaaggagttcggcggcgtggacgccttccccatctgcatcgacgcccacgacgctgccagcgtgatcgccgcctgcaaggctattgcacccacctttggcggcatcaatctggaggatatcaagagcccggagtgcttcgagatcgaggagaccttggagcgggagctggacatccccgtgttccacgatgaccagcacggcaccgccatcgtggtcaccgctgccctcatcaacgccctgcgggtggtgaataagaagatggaggacgtgcacatcgtcctgaacggccccggtgctgccggtaccgccatcatcaagatgctcatgaccgccggtgccaaggacatcgtggcggtggatcagttcggcactctgtacaagggctgcaacagcgccgaagcgcacaagaactggctgggcgaggtgaccaacccccgccagatcaagggcggcctgaaggaagcgctggagggcgcagatgtgttcatcggtgtgtcccgccccggcatcctgaccaccgagctgtgcaagaccatgaacaaggacgccatcgtctttgccatggcaaaccccaccccggagatcatgccggatgaagccaaggcgggcggcgtgcgcgtgatggctaccggccgcagcgacttccccaatcaggtcaacaacgtgctgtgcttccccggcctgttcaagggcgcgctcagcgtccgcgcccgggatatcaacaatgagatgaagctggctgctgcctacgccattgcagacctcatcaccgatgcagaccgcagcgaggagaacatcatccccggcgcgttcgacccccgcgtggccgaggctgtggcaaatgccgtggcaaaagctgcccgagagaccggcgtggcacggctgtaagcggaggacacaggcatgagaacgatctccgcacagagcattacggatacggtggcgcggctctgcatcaaggccaacacccagctgccgcaggacgtgcaggccgcgctggaaaaagcccgggaggaagagccgtggccgctggcaaagaacacgttagacctgctgtggtcgaaccttagcgccgcaaaggaaaaagacctgcccatctgtcaggacaccggcatggcctgcgtgttcgtggagctgggcacggatgtgcacattgacggcagctttgaagccgccatccacgagggcgtgcgccggggctatacggacggctacctgcgcaagagcatcgtggccgacccgctgcgccggggcaacaccggcgacaataccccggcggccatcacggtacatctggtggacggcgagggctgccgcatcacggtggcacccaagggctttggcagcgagaacatgagccgcatccagatgctcaagcccgccgacggcgtggagggctttaaaaagttcgtggtggatactgtaaagcaggccggctccaacccctgcccgcccatcgtgctgggcatcggcgtgggcggcagctttgacaaggtggcgtatcttgccaaaaaggcgctgctgcgcccgctggatatccccaaccccgacccctactatgcccagctggagcaggaactgcttgccgccatcaatgcactgggcatcggcccgcagggctttggcggcaagaccacctgccttggccttgccattgagcagatgcccacccatgtggcgggtctgccggtggctgtgaacgtttcctgtcatgtgacccgccgcgccagcgcggagctgtaaggaggggagaacgatggaatacagactgacgactccctgcaccgcgcaggatcttgccccgctgaaagcgggggataccgtgctgctttccggtgtggtgtacaccgcccgggatcaggcacacaagcggatgatggaggcgctggacaagggcgagaccctgccttttgatctggaaggcagcgccatttattatgtaggccccaccccggagcgcccgggcgaggtcatcggctcggcagggcctaccaccagcggacgcatggatgccatgagcccccggctgctggaccttggcaacaagatcatgatcggcaagggcaagcgggatgccgccgtcaaggcagctgtggtgcgcaacggtgcggtgtatctggctgcgctgggcggtgccggtgcgctgatggcaaaaagcgtgcagacgctggaagtgatcgcatggccggacttgggctgtgaagcggtgcgccgcctgactgtgcaggatatgcctctgaccgttgtgctggacgcccacggcggcgatctgtacgaggaaggcccagccgcctatctggcggcgcggtaaattgcaccctttgcacaaaacaggagcggtgcaaaaccgacaaaacagcagttctgtgcagagaaatatggttagtttaaccaaacttgctgcgaattgcttgcatcaaccgcaaaaatgtgatatcctttaacatacgacagagggtacacataccctgtcggaaaaatcccccagagggaataaggcaggaggccggacaaaccatgcagatccaccagtccgcggaagattatcttgaaacgatcctgatgctgagccagcgtatgggcaaagtgcgctccattgacgttgtcaatgagctgggctttaccaaagccagcgtgagcatcgccatgaaaaagctgcgggagaacggctatatcgcggtggacggcgaaggcaacctgaccctgctggagcccgggctggagatcgcccagcgcatttacagccgccaccagctgctgacccacttctttgtgcagctgggcgtggacgagcagaccgccgccgaggacgcctgcaaggcagagcacatcctcagcgagcagacgctggaaaagatccgcgaaagcgccctgcgcaacgatgccgcccatccgcaggcaaagtgatttgagttcaaaagacaccggaacgccgaaagacgttccggtgtctttttttgtacgaatttttcggtttgtgttgcatatttgttatggatttggtacaatgggtttgtgcgaaaaaggaacgttggaagagcggaaaagggtcgggacggcacaaggccgccctagggtaaaggagagcgttgcggcatggatgcgattgcgcatactcaggtcagtgggctctgtctggtcacactggtggttttgctgcgggcgcagcagaaaatgcgggataaaagtctgcccgggcggcagtttacggcgctgctgtggtttgccggggcgctgacgatcgtagattatggcagtgcgctggcgcagctgggcgcgtgggaggatctgggcatccccttgacctaccggctgaacgccgggggcagcattttgttttatctgctggcggcgtgctgctgcctgctggtgtttttgtatgtggagacagagctggggcatacatggatggaggacggccgcaggctggcactcagcgccgcaccggtgacactgcttttgctggtgctgctgacagcgcgggacgaaaacggcttttgctatctggatgcagaagggctgcggggcagcaccctgttctgggagccgaagctggtggggcttgcctatctggcagctgcctttctccgctgcagctggacgctgagccactggaagcaggaaacacccaaagaggaactgaagaccctgctgctgcttgcgcttgcgccggcggcaggctttttgctgcaaggctggctgcccgggcgcgggctgctgtgctgcggcattacgctggggctggtgtgcgtgtatgtgctggtgctgcagaccaagttcacggtggacaccctgaccggcgtcagcaaccgcatcgtggcgctgcgctatctggaaagcgaactgccctattaccgccgccaccccaaccgctcgctgcatttcctcatgatggacatggatcacttcaagcacatcaacgatgaatacggccacttggagggggatgccgcgctggtgctgctggcaggcattttgaaaaaggtgtgcgccaactataacggcgtgctggcgcgctacggcggcgatgaattctgcatcgcctgcggctgcaacagcgtggaggtgcgcaccctgatcgcttccatccagcgggagctggatgccgccaacgcagtctccggcaagccctaccagatcgagatcagcatcggctgcgcccgccttgagccggacatcgccaccgtgcacgacctgatcgacaaggcggatcaggagatgtaccacctcaagacccgcaagcgcggcacagcccccgcagaaaaacagggctgaacagttgtgaacttactataacatgataaatgccgtttgcctttacggcctttcccgtgaaaaatgcaataccggagcgtccgcagacgctccggtattgctctatataaaaataatttttccgctgaagatggccaaagcaaagcggaggccattcaaaatcgtcccgccccgcgctttctatacgttttttacccttctgcccttgcatcccggggtggaacgcggtattcttatagaatagaccggaaccgcgacagcacaggggagggaaaccacatggacgcacaggagatccgcgcattgctgggcaaaagcatctttgagcgggcacagaagtaccgcaagcgcatcctgcaaagcagctgcaccaccaacgaggacggggtgcggcacctgacagcactggtgcagggcagcgggccggactgctattatacgcaggtctggctgcgggaaaacggcagctttgtcagcgcctcctgcgactgcccctataaccagaacggcgacggcacctactgcaagcatatcggcgcgctgctgctgcaggacgcagaaaagaacccgcctgccccggatgctccggcaaaaaagccggagagtattcccggggtgcagcggggcgttgcaggcttgagcaccgaaccccgcaaggacagctacagcgctgggctggatatgctgttcggccgcaagtggcggggcgaggagccggagaccgactatgaggcccagctgctgctgaagcgctaccagcgggaggatgcgcagcagcagccccagcccgctgcccagcgcaccggctttgccctgctggagccggaacttacgccgcacaatggccgtatctggctgcggctgcgggtctcggacggcatcggcgggcggcagtatctggtaaaaagcatcccgcagtttctggatgcggtcgagcagggcgaaagcgtcagctacggcaagtcgctggcgtttgtgcaccggtgggacgcttttgccccggatgcgcagcaattgctgcggctgctgcgccgtcaggtgagcgcccggcaggcgtttgaagccgagggtacagtgcgctccggctgggagaaaggcccggcgggcggtctgccgctgaccggcgaggggctggatgcccttgtggagctttacgccgccgagggcgctgtgggcggctatacccttaaagagggtctgccggtcatcagcctgaaggtggagcgccgcaagggcggcgtgcagctgagctgtaccccggcgctcagcggggtgcaggggctggactatgcttatctgctgggcgagaccaccctctggcggatgcagcgggaggaatgccgccgggtgctgccggtgctggagacctttggcgggcgcagtttgttctttaccagcgcggatgccgccgctttttgcagctatgtgctgccggaactgggcaaccgggtcaacatcgtggaccccgaccggctgctgctgaaccagatcccgctggaaccggtggtgcagttttatctggacgccgaccgggggcttaccgtcacggcgtacccggtctttctgtacggcgaggacagggtagcccccggcgagccggtgccgccggatcttttgcgggatgcccgcaccgagaaccgggcaaagcggctgctggaaacctatctggaacccgagagcggcaagcccgggcattacagcatttccggggaggaagcgcttttccagctgctggaagagggcattcccgccctgctggccatgggcgaggtgtaccagaccgatgccttccgcaacctgcaggccgccccgcctaaaatttcggtaggggtgtcggtgcacggcagcgtgctggacttggaagtggacaccggcgcgttcccggtggaggagctgcgggagcttttgcagtccctgcaccagaaaaagcgctaccaccgcctgcgggacggcagtctgctgcggctggacgacagtctggaagggctggacgagctgaacgacacactggaactttccggcgcaaagctgaaggacggtcacgccgccctgccgctctaccgtgcgcccacgctggactgggcgctttcggggcagaacggcctgcggttcgaccgggacgatgctttccggcgcatcagccgcagcttccatgccgtgcgggacagcgaatataccccgccgctctccctgcaaaagaccctgcgcaaataccagcgggacggctaccgctggctgcgcacactggacggctacggtatgggcggcattctggccgatgatatgggtctgggcaagaccgtgcaggtgctcagctacctgctggccatgaaggagggcgggcagcagctgcccagtctcatcgtctgcccggcgtcgctggtgctgaactggcaggaggaatgccagaagttcaccccgcagctgcaaagcgttgccatggacggcgatgccgcccaccgtgccgcactggtcgatgggtgggcgcaggcggacatcgtcattaccagctacgacctgctgcgccgggacgaaaaactgtatgccgggcaaagcttttacgcctgcattctggacgaagcgcaggccatcaagaaccacaccacccagaaatacaaggcggtgtgccgggtgaacagccgggtgcgctttgcgctgaccggcaccccggtggagaaccgcttgggcgagctgtggagcatcttctcctttttgatgcccgggtatctgcccccttacaagaccttctgtgcccggtttgaaaagcccatcgtgcaggacgaagatgccaacgctgtgcggcggctgaaccagttcaccggccccttcatcctgcggcgcatgaagtccgaggtgctgcgggaactgccgcccaaaaccgagaatgtgcgccgcgttgaactggaaaccgagcagcgcaagctgtatctggcggcggtggtggacgcccgggaaaagctgcgggcggcaaagccggaggacaagatgaccgtgtttgccgtgctgatgcggctgcgggagatctgctgcgacccgcgccttgtggcagacaactggacgggcagcagcgccaagctggacgcctgtctggaacttgtcaccgaggcggtggcgggcgggcaccgcattctgctgttcagccagttcacctccatgctggagctgctggcaaagcggctggacgaagccggggtgagccacttcaccctgcaaggctctaccccgaagccagtgcgtgccgagcaggtgcgccggttcaatcagggcgaggcagacgtctttctcatctcgctgcgggcgggcggcacaggtctcaacctgaccgccgccgatatcgtcatccactacgacccgtggtggaaccttgccgcgcagaatcaggctaccgaccgcgcctaccgcatcggccagcgcaacccggtgcaggtgtaccggctgatcgcgcaggacaccattgaggaaaagatcgtggaactgcagcaggccaagcagtcgctggccgacaccgttaccggtggggcagacggcgcgattttgtctatgaaccccgaacagctgctgcagctgctgggagaagaagcataaaggagtgcatccatcatgaaggtttgggatctgcattgcgataccctgtacgaactgcgccgcgccgaaaaggcgggcgcacccaaaagctttttacacaacgatctgcatatcgaccttgaaaaattgcggcagggggattatctgctgcaatgctttgcggcctatgtggatctggccgaccccgcacccggagccgacccgctggtaagcgtgctggaggagatcgacatcttcaagcggctcatggcggcttacccggaaaagatcgccccggtgtacaccgccgccgaccttgagcgcaaccgcgccgagggcaagctcagcgccatgctgacggtggaagagggtggctgctgcaagggcagtctgggcgtgctgcggcggctgcaggaactgggcgtgcgcatgatgaccctgacgtggaactaccccaacgagctggcagcccccaacgcaaaccccggcgggccgctggtggccaacaccgagactggcctgaccgagcggggctttgcctttttggaagagatggaaaagctgcacatcaccgcagacgtgagccacctttccgataagggcttctgggatatcgtaaaccacagcacccgtccctttgcggcaagtcattccaactgccgggcgctgtcgccccataaccgcaacctgaccgacgagatgatccgcgcactggcagaaaaaggcggcattgcggggctgaactactgcgcttcctttgtggacgcagactcggcacatccgaagctttgccgcagcacggtggagcggctggcaaagcacgcggcacacttcaagcaggtgggcggcattgaggtcatcagccttggcagcgactttgacggcatcggcggccagcacgagctggaaacggcagcagatatgccgctgctggccgaggcactgcgccgcgagggctttaccgaggacgaggtggaagccatctactggcgcaacgcataccgcttctttaaaaacaatctgtaataataacttctaaaattgcaaaaagtgcccgggatacccctgcgctgcgcgggtatcccgggctgtgtattgccctgcgaggggaggttttatatggtctaaggcgcgcgtctcctgaaaaagaacaaacgacttggaaagataagaggaattataacaatgggtatcacgatttcgccgtggatgatggcgtttctcatgctgatgaccggctttgcaggttttgtggattcggcagccggcggcggtgggctgatcagtctgccggcctatctgtttgccgggctgccgccccactacacctatgccaccaacaagttcagcgccgcctgcggcactacctttgccacggcaagctttttcaaaagtggtgccatgaacgtgaaggtgggtgttcttgcagccatcggcagctttgcgggcagtgcgctgggcgcgcacatcgtgctgctgctcagtgacgagatgctgcgcaccatgatgttcatcatcctgccggtggcggcggtcatcattctgtggcagcgcaacctgccggatgagaaccgggacgacggcacgctggatctgaaaaagatcttactggcgctggccatcggctttggcatcggcctgtacgacggcattatgggcccgggcaccggcacctttgccatcattgcctttaccaccctgatgggctttgacctgcgcaccgccaacggcaacggcaaggtgctcaatctggccagcaactacgccagcctgtttacctacctgatgaacggtctggtggtgttccacatcggcatcccctgcgccatcagcaacattctgggcaacctgctgggttcccacttcgccctgaaaaagggtgcccgcttcatccgccccatgatgctggtggtgctggtgttgctgctgggcaagctcatctcggacgcggtgctgtaagggcagggcgggacgattcagaatgcgctccgcgttcgctttgcgcatcagtagcggaaagaatatttttatttgtagttccgaaacgcctgcgggcgtttcggaactactttttcacagagaggggtcgtagagaaaagcggcagttacagcgccgctttctgcgaaagcgcggtgctgcgggaagcaacctcgccctctccgtctgctcactacgttcgcatccacctctcccaaagggagaggccttggcaaagagatgaagtttgcgtggactgccaagggctctccctttgaggaaagacttcccccgcgccgggggaagatgtcgcgcagcgacaaaagggggaatctggcgcgttagcgcctgagagggcaagggcgttgccaacaagggtgcacatcccaaaacagcgctattacttcccattcccctacaaaaaacaagtcgggcagcccgcgggctgtccgacttgttttagctttcaataggttttattccagcaccagttctttatcaaagaatgcgatgccgaaggcgccggggccggtgtgggtgccgatgacgcagccgatctggcgcaccagcggtgcgtccagatgcaggttgtcctgcaggtaggtcagcagcggctgcagctcccggtggttgacggtgtagcccagcagcggcgtgtagcccgggtggatgccgcccatctcatcgatcttcttgaacagcgccacatacacgccgggcagaccgcgcgccttaccggccagcgctaccttgccctctatgacggcgaggatgggcttaatgcccagcataccgcccgccacagcggcggcggcggacagtctgccgcccttgcgcaggtacttcagatcgtccacggcagccaccagatgcaggtgctgcttggccttttccagatcggcagcgatctggtgaatcgtcttgccggcgtcccgcagctgcaccgccagacgcaccagcaaagactgccccagacagacgttctcggtgttcacgaacaccacattgtccacgttggcaaggtcggcagcaagttttgcgcactgaccggtgccggacagggcatcggacaagaagatgcccagcacctcgtccccggcggcagcagcgtccagatacagctgctcgaactgctccgggctgggctggctggtagtgggcagcttgcggcaggctgccagatgggcatagtattcgctgggggtcatgtcgatgccgtcccgcaggacggtgccgtcctccagcgtcacgttcagggggatcacggtcacgcccagctgctgcgcctcggcgggcaggatgtcgcacgcggaatcggtgaggatacggatcataataatacctccggtctaccggtaaattacagtatacgcaacgttttcatcaaaaaggttggaaattattataccaccatttagggcgatatgtcaataatttgcataaatttgccacgacagaacgccgaaaccttgcgcactcggcggcagatatggtactataaccgggaacgaaccatagcaggaggaaaccgaccatgcacaagctgaacccccgcaccgccgcactgctttcggcctttggctgggcggttgggtatctgctggcaggcaaggcgctggcggtgctgctgcccgcagcaccgggcggcgcggcacggtttttccgggtctgtctgctggctccgctggcggaggaaggggtgttccggggcgcggtgcagcgccgggcgcagccgctgggcaggggacaggccattcttttgcaggcggtgctgttcgccctgcagcacggcagcgccgccgccatggcctacgcgctggtgtgcgggctggggctggggtggcttgccgaccgcaccgggcatctctggccggggatgttgctgcacagcgcaaacaacctgctggtgctggcgatgggatgagaggatgggatacatgaccgattttgaactgatgggtcttgcactggaagaggccggcaaagccgccgccttgggcgaggtgccggtgggcgcggtggtggcgcggcacggcgaggtggtagccatggcgcacaacacccgggagaccgagaaaaacgccttgcaccacgcggaactactggccattgatgccgcctgcaaggcgctgggcggctggcggctgtgggagtgcgagctgttcgtcaccttagagccctgccccatgtgcgcgggcggcatcatcaacagccgtctgcgccgggtggtgtacggcgctgccgacaccaaagccgggtgctgcggctcggtgaccgacctgttcgcgctgcccttcaaccaccacccggtggtggaaaaggggctgcgggaggccgaagcgcagcagcttttgcaggcgttttttgtttccctgcgggaaaagcgggcgggcagaccccgctggaagccctcggtgcccgaaaacaggggaaaataaggaaaaatagtgggaactgcgtaaaaaattgcagttcccactttctttttggactggattgtggtatattattcaatggaatcttgtcgaaacccatcgtaagtacaggcaggcacgccaaagcaccggacctttgccggacatacgaacggaacgctgcactgtctggggatgggcacagggtttttccggctggggcactgcgcccggccgagaataccgaacaggagggatacactcttgtacgaggacgagtttgaactgacctttcaggtgccggaggaagagagcgcaccggagccccttgccgcaccggctgtaaagccggctgcgccggtggagccggtggtggacgagcccacccgcatcatgacgctggaaaaaacggcagcgcctgtggcggaggagcccacccgggtgatcacgatggaaaaacccgcagagccgcagccgcctgcgccgccgcagcccgaagagcctgcgccgcagcctgtaaaagaacggcctgcccctgccgcgcccgctgcggcgcgccgggtgctgatctccggcggcgaccggggcatcggtgctgccgctgcccgcgcctttgcggcagcagggtatcaggtggcggtgctctaccaccagaatgccgccgctgccgctgcgctggaacagcagctgcccgggtgcatcgccatccagtgcgatgtagccagccgcgccagctgtgagctggcgttccacgcggtggagcaggccatgggcagggtggatgtgctggtgtgcaacgccggcatcgcgcagcagaagctgtttaccgacatcaccccggaggagtggcagcggatgctggacgtgaacctgagcggcgcgttccacctgtgccagctggcgctgcccggcatgatccgccgcaagcagggccgcatcctgaccgtgagcagtatgtggggccagaccggcggcagctgcgaggtgcactattctgccgcgaaagccgggctcatcggcctgaccaaggcactggccaaggaagaaggccccagcggcatcacggtgaactgcgtagcgccgggggtcatcgagaccgatatgatggcggcttttaccgccgaggacaaggcggcgctggccgaggagacccctgtggggcggctgggcaccccggaagaagttgcaaagctgctggtctttctggccggcgaggatgccggatacatcaccggacaggtgttcggggtgaacggcggtcttgtgatctgatgcacagggcaatattacacaattttccccggagcgggaaggagagaaaaaatgggcatgactttgaaggaactgttgactaagggcgagggcaccctctctgcacaggaggccaaggcgctggcggcacaatgccgcatggatgtagataccctctacaccctgctggaagagcgcggcatcaagatcctggaggaagagaacgagccgagtctggacgtggacagcatcattgctgaggtggagaacgccgagaacaacaacgatgacatgggccttgccgatgagaatgaagaggatgccgaggagaacccggcagacctgaaggctgccatggacgagctgctggatgacccggtgaagaactacctcaagcagatcggtcagatcccgctgctgagcgccgagcaggaggtggaactgagccgccgcatccatgccggtgccgaggctgcgcacattctgcaggcagaccgccagaagtacgacgcaccggagtacatcaagaagaacagcgcccgtttctcttttgaagaggacgagaacagccgcagctacaacgaggatctggacgaggacagcgaaaagtccgccgaggatgccgaggaaaaggcagacgaggaaaaggccatggaagccgtggaaaacggccctctgagcgaggagcgccgtcaggaactgctcaagacccgccgcgacggcctgaacgcccgccgcagcctgagcgaagcaaacctgcgtctggtggtgtccatcgccaagaagcacgtcggtcataatcttgccttccttgatctcattcaggagggcaacatcggcctgatcaaggctgcggaaaagttcgactgcgaccgcggcttccgcttctccacctacgctacatggtggatccgtcaggccatcacccgcgccattgcggatcaggcccgtaccatccgcattccggtgcacatggtggagaccatcaaccggatgcgtcaggccaccaaccagctggtgtaccagaacggtcacgagcccaccccggaagagctggcaaaggccatggacatgagcgtggagcgcgtgcgcgagatccagcgcatggcacaggagcccgccagcttggaaagccccgtgggcgaggaagaggattcctctctgggcgatttcgttgctgacgaaaacgccgaagcacccggcaaggcagccgaccgcgccatggtggcacagcagatcaatctggcgctcaagagcctgaccccccgcgaggaaaaggtcatccgtctgcgctttggtctggacgacggccgtccccgcacgctggaagaggtcggccgcgacttcggcgtcacccgcgagcgtgtgcgccagatcgaggccaaggccatccgcaagctgcacagccgcaagtgcctgaccctgctcaacggcctgatcgagtgatcgcccgccgggcaggcagaacgatttgaaatgcgcgccgcgtttgctttgcgcatcattcaaggaaattttatttttgatttggggttcaggaaagtctgcggactttcctgaacccttttttcacaggaggggtcatggcgggaaatgtcgtttatctctgcggccttttccgtgaaaatgcgtttgtcgcggcccgcagaacttgtcggggcaaagcccctccatctgctaacgcagaccgctctgccgcttaaaagccccactggggctttcattgctacgctgcgctccgcaaacgcggtcgctccaaacgcgaaatataaagaattgttccgctatttatgcgcagagcgaagcggagcgcattttaaatgtctttcggcagagtgttcaacggcggggcggcggcgttgtgcggaatatccaaaaattgcgcggatgcttgtattttgcttgcggagcgtgtacaataagcacagaatatgtttgcgcagagcaggagagcgacagacagagcagatggctttgtttggtgcgctcttttttgttttgcgctcaagcttcagagcaaggagagacgatcatgagccagaccaaatacatcctctcattagatcagggcactaccagcagccgggcgatcctgtttgacaacgagcagaacattgtctgcgtgcagcagcgggaatttgagcagatctacccccatcagggctgggtggagcacaaccctatggagatctggtccagccagtacggcgtaatgaacgaggtcattgcccagagcggcgtagaccccagggacattgcgggcatcggtatcaccaaccagcgcgagactacgatcctgtgggacaagaacaccggacgcccggtgtataacgccatcgtctggcagtgccgccgcaccgcaccccttgtggacgagctgctccggacccccggcatggcggactatatccgggaaaacaccggccttgtgccggacgcctatttctctgccaccaagatcaagtggatcttagagaacgtccccggtgcacgggaaaaggccgaagcaggggagcttttgttcggcacggtggacacttggctggtctggaagctgaccggcggcaaggtgcacgttaccgaccgcaccaacgccagccgcaccatgctgtacaacatccgcacgctggattgggacgacaccctgctcaaggcactggacatcccccgctgcatcctgcccagtgtgaaggactccagcgaggtatacggctataccaacattcagggcgtggatgtgccggtagccggtattgcgggcgaccagcaggctgcgctgttcgggcagggctgctttaagcccggcgacgtgaaaaacacctacggcaccggctgcttcctgttgatgaacaccggcaacaagatctaccagagcaagaacggtctggtcaccaccatcgccatcagccttgacggcgaggtggagtatgcgctggaaggctctgtctttgtgggcggtgcggtcatccagtggatccgggacgggatgcacctcattcaagacagctgcgattccgagtattacgcccagaaggtgccggacaacggcggcgtgtacatcgtgccagcctttaccggtctgggtgcgccctactgggatatgtatgcccggggtgccattctgggcattacccgcggcaccacccagaaccacatcatccgcgcggccgaggaatccatcgcctaccagagcgccgacctgatgtgggcaatggaaaaggacaccgatatcaccatcagcaccctgaaggtggacggcggtgccagccgcgaccacttcctgatgcagttccagtccgatatcctgaacaaggaggtgctgcgccccgccatccgggagaccaccgcccttggcgcggcgtatctggccggtcttgccaccggcgtgtggaagagccgggaggagatcagccatctgtggagctgcaaccagctgtttgagcccaaaatggacgctgcccagcgggaaaaactggtcaagggctggcacaaggccgtgggccgcagtcaggactgggcggagcacgaggtgtaaggcagaaaacttctgacaggataacgcgataccccccggcaggctgccgccgcaagaacgatagcctgccgggggtattttgtgccgttccgctccagcatggacgggtggatgacgcagcaaaaaagcccctgaccgaggtcagaggctttgatcaaggggtgcgaagttccaaactttgccagaaacagaggttatcgggtggaagccgcattgtctgcgggccacgatcttctgagcgccgcataggagacaaggaagtttgccagccagcccgccgggacggcaagccagacaaaggcgatgccgaaacgcggtgcgccgatcagggcaacggacagacggatcgcaaggtttaccatgttggcaataagaaacgggcgcatgacgccaagcccgcgcaggacgccgtcggtcgccatcttgatgcccatgaagatgaagaaatagccgagccatctcatgtaatcaccggacacctgataagccaacgctgttccgtccttgcccaagaacagcgaggagatctgggtatgcagtgtctcgatgaccacgaatgcaagaacggcaaagcagagatccagaatcagtgcggcgtggtagccttttttgagacgatcggttttctttgcgccgagattctgggaaacgtagggcgaaacggcattgccgatggatacaaagatcagggagaaaacattctctacccgcatcgttgccgaataccctgcaagtgcctgtgtgccaaagggatttaccacagcctgcacgatcatcataccgatggacacggtggactgctgtaaaatcgatgggacggcaaggcggagcatggactgcagctcctgcccgtcgaaccagtgaaaggggcttttgtaccgccgcatccgcgcaaagaagatcaaaagcgagaacacagcagaaatgccctgtgcgatcagggtcgcaagggctgcgccgaacacgccgagatcaagaccggctaccatccacagatccataaagatattcaggatggacgagaagatcagcagccccagcgggatcttggattccccgatagaggtgaacatggtggaaagaatgttgtacatgaacaggaacgggaagcctgcaaaatagacccgcaggtacagcactgcatcttccagaatgtcggcaggggtctgcaagccgctcatcatcgaatgggaaaagcaaaagccaaaaacgccaaggacgatgctcaggatcaaaaagctgagcagggatgttgacacgatggtcttcattttgccatagtctttggcaccaaaatagcggcttacaagcacgcctgcacccacacctgcaccaagcgccacacaaataaaaacgttggtcagcgcagcacaggcaccgacagccgcaagcgcggaggaaccaacaaactgaccgacgatgatggagtcggccatgttgtagacctgctggaaaaagctgccgaggatcatcggcattgcaaaaaccgtcagcgctttcaggggcgcatcggtgatcagatattcatcctttgacatgattccattccttctgaaatttattgctcttctgagtcaaatccaagtataccacacccgtcaaaaaaatacaccccaagatgccggaattgacaggcagacgttctgctactgccaaccacaaaaaatccccagaccgaatggtctggggatgtggtggagcattgtcagcagcagtcgaacctgaatttattccagatactgcggcaaattccaagcaccgcgcaacacacggtggacttccacagtctttatttcatcgttgactcggtaaaacaccaaatattggtctacaaccattctacggtaagcagggtcagggcggtagacctcgcacattttcggggtatcgcccaattttgtgattttctctcgcagctctttcagtacgcggctggccgttttagggtaaaagccagacagataccgggcaatctcattcaaatcctgcacagcaaggggcagatatttaattttatacgtcatactgcttgcctagcgtctcccatacgctttcgtggtctgcccattgcgtgtcggggtcagccgcctgctgttttgccttggcaagtgccttggcaacatatcgctggtgcaaaaactcttcgtacttggcgtagtcctcaatgttgatgagaactgattctccacggccatgattcgtgatgatcacatggtcgtggtctttgagcatttccgaaatttcggcgtaatggttgcgcagatcccgggaagggcgaacgaatgtctgcatcatacgagacacctcctattagaatcattgtatcacaaaatgactacgggcgcaagacagataattctgacggtgagagcaagaatcgtcccgtggccaaaaattttcaattcttgaaaatttccagccccttgggacagctttcttgttggggcgtgcggtgccccaagccctgcttcataatatcgatcatgaccgatcaacgactgatttatagtaattgccaaagtctgcaagtgcattgacgattggtaacatttccgttccgagatcggtcaacccatattctactttgggagggttctcgtgataatcacggcggtaggcaagcccatcatcaatcatctgtcttaagctctcggtcaaaactttttgcgagattccatcgatgcttctttgcaactcattgaatctccatgggcgctctttcagattgcgcagaagcaagagtttccattttccgccaatcagggatactgctgttgcaaccggacattccggcagttcttcttttgtacgcatatcagtcacctctgtatatagtatatcacattcatttttgagtgtacagttacaaaaaagtgcgtacttgtttttgaatgtgcgggcttctatacttagctcaggcaatgaaagattgcgaatcaaaatggaggtgcttacaatggcaagctatacaaaaatgacagttggaaaagaaaatcggacggagcttcatgaaaagctcgccctgactggtgcggagatcagtctgaatacgcttcctgcgggagcaaatgttccgtttgtccactcccacaaggcaaatgaggaaatctacggtgttctttccggcaaaggcaaggtcgttatcgatggcgaagaaatcagccttgcagcaggcgactggctgaggatttctcccgtggcaaaacgtcagttctttgctgcaagcaattctgagatcacttatatttgtattcaggtcaaggagaattctctcgaaggctatactgcaacggatgctgtgatctactgataaaacatatcaaaacaaaaggcaggataccactaccatagtgataccctgcctttgcttatttttattctcgtcctgtcacaacaaaaaatccccagaccgaatggtctggcggcatctttcttggtagacattcctacgcgttgggaaccgcgggctaagcaacagcccactgggctgattgcttacggcacttcgtgccgccgccctgttcgagccctgtaccgcccaccacaaaaaaatccccagaccgaatggtctggggatgtggtggagcattgtccacagcactcgaacccaacacttcctcacgggtgaccgttttggcatcatccgtgaagttgaaattgagtacgacccggtcatcaaagacgtagaccgagttgacaaaggtatcaatgatctgccgctggtgctccgtgctgcccacgtcacccttgcggaatttttcaagccagaaccgaatccactcacgggtcaggacgggctttttcagctcttcttccagaatgctggtgttcagggcttctttccgggcttccagctcgtccaaccgctgcttggtagtcggggtcaggatgccctgttcaatggcttccagaaggtttgccagccgcttctctgtgtcccggagctggtctttcaggacaggcagccgggtgttctcctgctgctgggcttccatgaccaaatctatcagccgttcgatgatttcatcgctgaaaatcaccttaatggcggtatccaccacgaaccgttccagcggctccttgcggatggctttcaggtcgcagtgcgccttgccgtggcgtttggcgttgccgcacttgtaataatagtaggtgttccccatgtggctggtgccgctttcgccgcccatcagggtgccgcacttgccacagaacagcttggtggtcagcagatagctcacatcctcttttgcaggccgaccgtgggcgatcctgttttgctcgaaacgctgctgcacccggtcgaacaagtcctgatcaacaatagccgggatgccgcccggcgtcacaatgtccttgtatcggtattcgccgatgtagcggcggttgcggaagatctggaagaagctgttcttcacgaacggcttcccggtgcgggtacgcagaccgcgctcgttcagggatgctgcaatcttctcggccggttcgccgtcggcataccgggtgaagatctcctgcacgatgggagccgtctccgggtcgatatggtacagtctgtcctccttgccaatggtgaagcccagcggaacgataccgccgttgtacttgcactggagggcattttcgcgctcaccgcgcgctactttcagggcgagttcggcggaatagtattccgccatgccaataagcatactctccaccataatgccttcaggcccctgcgaaataggttccatggcagacaccagatggacaccgttcttttccagctggtacttgtagttcacggcatcgaaccgattccgggcaaagcggtcgagcttccagaccagaaccacatcgaagattttcttcgcgctgtcctttatcatcctctggaagtccgggcggtcatccgttttggcagagtaggcacggtcaatgtaggtgccgaccacggtgatgccgttcttctcggcgtagtccttacagtcgcgcagctgtccctcaatggacgcttcgcgctggctgtcggatgaatagcgggcgtagattacggcggtcatggttgcacctccttggcgcgtattcgacttgcctttatagtatcgggtcaagcgcagcttgtcaacaatctgcgagcagattgaaatgtgaaaattgcgaaacgcagcgaaaaaggggagagcaagaatcgtcccgtggccacaaattttcaattcttgaaaattcttgcccctttgggacagcttcttgttggggcgtgcctgccccaaaccctgctaggaacgagtacagcaaactggaattgaccgagctgatagttaccgttttctaacactccattcatcatcttgagcttttctttcagcatagtaaccgcaaggcatatcctttagaataccaacagaattatctaagtcgaatactgattttaaggatactaactttgcttcgtctgtttcatgtgcttttccacatagaaattgccacattccatcatcttcatcatgtgatacatacaaaataggttctccattctctaatatgtgacaacaggttattgtagctgtatttggtgcatcataaaatgggaatttcatatttaacactccttcaaattcttatttgttgaactaagccgagtataccataccctccaatgaaagaacaccccgatatagtgaaattttgccatttttctgcgtgcgtacgtacacgctccgcagggattctaaggggcttggccccttggcacacagactttggcacaaagtctagtgtgttacaccttgtcagaggtgtacaggctcccggtacgcacgtacgcagcgactacccccaaacgcgccatatagggggacgaccaagttcgcacaaagcgaccttgatcccgcaaaacaaaaggcaggataccaccgtcatggtgataccctgcctttgcttgtttactgctctgcgtactcttgccgcagaacctcccgtaaacaaaaaacgtacccgaaccctttttcgtaaagaatcgggttcgagtacgaactgtatggtggacggtacaggactcgaacctgtgacctcctgcacgtcaagcagatgctctaccagctgagctaaccgtccatgtcatatcgacttggatagtttaccacagctttttgcaaaaagcaagaccttttgtgcttttttatgcgttcttttttacttttccggcgagagtgcccggcggatgatatcgtacagcaccggcttcatggcgtcgatgttgtccggcttgccctccagaatgctggaatagcacaccgacatacacatactgccaagggccgtgatgcgctggtagacctcccgctcggtgcggccggccatctccgggctggaaagcacgatggccagcagcttgcgcatcaggggctcggcctccctgctggcttcgatctggtccagcccgggccagacgaagttgcgctccaagaaccgcagcaccagcacgtcctgccgcaaagcctcgatgatatggtcgatgacgaacaccacctgtgcggtaaagtcgggcagctcggggtgctgctcgaccgcaaggcaggcatcgctcagcagctggtagctcacccgccccagcagcgcctgcatcaccgcgcccttatcctgaaaatacagataaaacgtgcctttgcccacctttgcccggctggtgatatcctccacgctggtcttggcggtgccccgctccagaaacagctcgtaggctgcatccagcagggcgcggcgcttttcctgtttcttaccttccacggtgctcatgctctgggtagattcctcttttctctgaatttagacgcaggtatgtgctgcgtccggcctgtgctacttagtttagcagtcctttgccgtttgtgcaagcccgatttcttatacaattttttgcagttgataaaaaaactgactttcggtcactttttctgcttgacacactgtccggggtggatataatagtgtttgcccggaagatgaccggcggtcagtttcgcgggctttcccaatcaactttctattctggagggttctcatgaaaaagatcgcacaaggcatcgtgcgtctgcgcaagctgatcttaacagtggcagtgctgctgttgatcccttccgcgatcggcgccattgccacccgcatcaattatgacatcctcacctacctgccgcaggatctggactccatgatcggcgaggtagcccttgaggacgatttccatctggcctccaccggtatgatcacggtagagggcctgccaaccaatgaactcatcgctatgaaaaaggagatagaagccgtgcccggcgtcacccagaccttctggctcagcgatgtgatcgaccccaacatccccaccgccatgctgcctgccgatgtgcagcagttcatgttcggcaaaaacgattccactatgctgatcgtccgctttgacgcccccagcgccagcgacgagaccatggaagccgtcaagcagatcgaaaagctgctgcgcaaggactgcttcttcggcggcatgagcgtcattctgcaggacaccaaggcgctggtcaatcaggaaatgcccctgtacatcctgatcgccgtgggtgccagcctgctggtgctgttcctctcgctggaaagcaccctcaccccgctgctgttcatgctgggtctgctgttccccatcgcgtacaacttcggcaccaacatctttttggggcagatcagctacatcaccgaggcgcttgccactgtgctgcagctgggcgttacgatggacttttccatcttcctgctgcaccgctatgaggaagaaaaggagctgcgctccaccaatgaagaagccatggtcagcgccatctgcaagaccatgacctccatctccgcttccagcctgaccaccattgcaggcttccttgcactgtgcgccatgcgtctgacgctgggccgcgatatcggccttgtcatggctaagggcgtggcactgggcgtcatctgcaccgtggtcattctgccctccctgatccttacctttgataagtgggtggaaaaatacaagcaccgcaccgtcatcccccggctgaccaagctgagctactttgtttccaagcattccgtgcccatcgtggtcgtctttatcctcattcttatcccctttgccattgcgcagaacaagaccagcgtgtactacaccctgttcgattccctgccccaggacctgaccggcatcgtgggcaccaacaagctgggcgaggacttcggcatgaccaccagccacttcattctggtgcatgacgatctgaccgccacgcaggtgtccgacctgtgcgacgagttgaaggacgtggacggtatcacgcaggtggtaagtctggattccattaccggccccggctttgacaccgagctgctgcccgacagcgtgatggagatcctgcagtccggcggctacaagctgatccttgccaacagctcctacaagaccggcacggacgccatcaacagccagctggacaagatgatcggcctgatcaaaaatgtagatcccgagggcgtcatcactggtgaaggtgccatgaccaaagacctgatcgaggtggcagacgtggacttcaagaatgtcaacgtctggtcgatcatggccgttctggtcatcatcgccatctccttcaagagcatttccatcccggtgctgctggttgccagcatcgaagccgctatcgccatcaatatgggcatcccgtactttaccggtacgcagctgcccttcatcgccagcatcgtcatcggcaccatccaactgggcgctaccgtggactactccatcctgatgaccacccgttatcacgaggagcgcgcctttggccgcacccccaaggaagctgcccagcagtcgctggaacattgcagccagtccatcctgaccagtggtctgaccttcttcgccgctacggtcggcgtggcagccatcagtaagatggagctgctgcggagcatctgcctgctgatctcccgtggcgcactgatcagtatgctggtcattctggtggtgctgcccgccgccctgatgctgtgtgactggctcatccgccacaccaccctgaaatggatggtacctgaatctgccaacgccaagaagtctgaaaaggagtaatgcgttatgaaaaaatcgcttcgtttcgccagtgcggcgctggcagttgcccttgccgccagctgtgcagccccggcttttgccgcaggcggcagcagctttaccaagtctgagaccgtgtacgctgtgatgaacgccgatggctccatccagagcaccaccgtcagcgagcacgtttacagcgcctccggtctgtccaatgtgaccgaccagagcaccctgaccaatatccagaacaccgagagcagcgccgagttcacacaggacggcgaaaagctggtgtggaacaccgacgataccgatgtgtattataaaggtgacactacccgcgccctgcccattcaggctaccgttacctacgcgttggacggtcaggaagccgcactggaagatctgatcggcaagagcggtcatctgaccatgaccattgccctgaagaacaacgagaccggcaccgtgaacgtgaacggtactgaccgcaccatcgttaccccgctggtcaccgctgtgggcgtgatcttcgggcaggatgccaccaacgtggtggctgcccacggtctggtggaaagcgccgccaagagcaatgtggctgcctttgtcaccctgccgggcgtgaaggactccctgtccggtctgctgccgaacgagctggacaccatcgaggactatctgcaggacaccatcatggtggaagcagatgtcaccgggctgacctgcccgcaggtgatgatggcctgcgccaccagcgctgcggctctgggcactgacaatgtgtttgacctgagcagcatcaacgacctgaccgatggcatcaaccagctgaacgatgccatgagccagctgctggacggcgcttctcagctggaggacggtaccacccagctggccagcggtgtgctggcactgctggacggtgccaacaccctgaacaccggtgccgctgcgctggacgagggtctggggcagctgaccaccggtctggacaccctgagcgccaacaacagcgccctgaacagcggtgcacagcaggtggcggacggcgtgctggcttctgccaacaagaccctgaaagagggcggtctgatcgacaccgacatgacttgggataactacgccgccgtcatcgataacatcctgaccatgaacgacaagacgctggctgccggccgccgcaagatggtgcgcaccatctgggagcaggctcccagcttcaaggacagccagctggatctggcgctgtacctttccgctaccaagacgaaccatgatctggaggctgctctgcacctgatgcagaactacgacccctccatgctgtgcggtctggtgcagctgctgaccagtcaggaggctaaggacaccgccaaggcagagctgaagtatcaggtggagaacagtcaggatatcgcggatgtgcgtgccctgaaggacagccttgccaagatccagtacttcgtttccagcgtggggcagtacactgccggtgtgcagaccgccgcagacggtgcccattctgccaaggacggcagcgcacagcttgccgccggtaccaagaccctgtatgacggtgtgaacaccctgaacgagggtgcaagccagctgaatgacggcacccaccagctgaacgatggcctgaaccagttcaacgaggagggcatctccaagctgaccggcgcactggatcaggatcagctgcacggccttaagaccgtgctggacgagatgagcgaccggctggaaggctacaccagctttgccggtgcacccgaggacgccgagagcagcgtgaagttcgtctacaagaccgccgagaccgtggccgctgccgacaacgttgtggcggagaccgagacggtgaaggagggcaacatcttcacccgcctgtggcagcgcatcgtggacctgtttaagttctgataacgccaacatccttccagaatcgtagatagaaatacagaagcgccccgcagccgaatgactgcggggcgcttctgtatttataatcctttaaaaatcagcttgttgcttactggtccttttccaccatcatcttgctggctttatagatatcgccgcagccgagggtgatgaccagatcgccgggctgggcgttctgcttgacccagtcggcggcttcctgcaggctgttcaccagcacggagccggggatctgcgctgccagctttgcgctggtaatggtggggtcgttgggctcgcggctgcccatgatgggggtcagcaccgtgatgtccgggatcttgagcacatccacaaagtcgttgaacagcatcttggtgcggctgtatgtaaacggctggtggacggcgatcaggcgcttgtagcccatctccttggcggtgttcagggtggcgcgcagctcggtggggtggtgggcgtagtcgtcgatgaccagcgcaccgttgcactcaccgtacacctcaaagcggcggcctgcgcccttgaagttcagggcagcttcggcgcactgctctgcgctcaggcccacaaagcggcacacggcgcacatggccagtgcattataaatattgtggcggccgggcacggacaggcggatgcgggtggtgtcggtcgtattccactccttcaggtcgaactcgaagaagccgggcttatactcgttgacattgacagcgcggtaatcggcgtggttgtcgatggcaaaggtgcgcacccggcggtccagtgtgtacatcacgtccatggtgttcttgtcatcggcgttggcaaagatcatgaactgggtcatcagggcaaagcgcttgaaggcgaacttcagctcacccatgctgccgtagtagtccagatggtcgttgtcgatgttcagcaccacggacaggtagggggtcagcttcaggaaggtctcggcgaactcgcaggcctcgataacgatatcatcgcccttgccggccttgccgtagccgttgatgaggggcagcttgccgccgatgacggcagaggggtcgcgccctgccagttccagcgcagtggtgatcatggaggtggtagtggtcttgccgtgggtgccggacacgcagatgctctgcttgtacaggcggctcacatagcccagcagcacgctgcgctccacggtggggatgccataggaggcagctgcgttcagctccacgttatccttggagatggcggcagagtacaccaccatgtccgcaccaacaacgttatccgcattgtggccaaggctgaccttcacgcccatctcccgctcgtagcggatgatgctgccgtccagcacatcgctgccggacagctcgtagcccttggcggcaaggatctggatcagcgggtacattccgctgccgccgcagccgataaaatggatcttctttacattgtccagcagatgctggctataatccgagtacatgaacatagtaaggctctcctccaaatattaacggctgcagcgcagaccgattccttccaaatatggggacacacccttattatataatttttgcagcataaaataaacaggtaaggccgaattttcggaaagaaccataaatcttttgtggattttgtgatatgtgtacaacaaaatcccggcagtattacttttttgcccgccgccgcaggatctcgtccagaatggcatcggccacgtctgccttgctcatcaaaggcagctcccgggtgccgtccggggtgatgaaggtgaccacgttggtgtctacgccaaagcctgcaccggccaccttaaggttgttggccaccaccatgtccagattcttcttgtcaagctttgcggaagagttttccacaagatcccgggtctccatggaaaacccgcacaggaactggtgggtcttgcgggggccgatggtgccaaggatatcctcggtgcgctccaccgggatagagaggtcgccctccttctttttgatcttgtcgtctgccacggtagcggggcggtagtccgccacggcagctgccatgatgagcacatcggtggcgtcaaagcggctggtcaccgcctcgtacatctgccgggcacttgtcaccggcacatcggtggtgaatttgaccggcggcagcgcggtctgcccgtggatcagggtcacctctgcgccccgcatggcggcggcgcgggcaagggcgtagcccatcttgccggtggagtggttggtcaggtagcgcaccgggtccagcgcttcctgcgtggggccggcggtcaccgcaatgcgcagccctgccagatccttcgggcgggcaatggtgtgcaggatgtactccagcagcacttcctccttgggcaggcgtccgctgcccacatccttgcaggccagcacgccgctttccgaggggatgacggtaaagccgtaccgctccagcgtggcaaggttatcctgcgtgatggggttttccagcattccggtgttcatggcgggggcgaccagctttggacactttgcagccagcaccacggtggtaagcatatcgtccgcaatgccgtgcgccattttggcaatgacgttggcggtggcgggggcgactaagatcacatctgccttttttgccagcgagatgtgggtgacctcaaacttgaaatcccggtcaaaggtgtccaccatgcacttgtggccggtcagggtctcaaaggtgagaggggtgatgaactgggtggcgttccgggtcatgatgacctccacatccgcacccagcttgcgcagtgcactggccacattggccatcttataggcggcaataccgccgctcacgcccagcaggacgcacttgccgttcagatccatggttcgtttacctcccggaaaaacagttcttttccacatatcttaccttagtataatgcaaaacttccaccagcacaacaaaatctttgccgggaacttgtatccggagcaaaaatgcggtaaaatacgcttgacaaagagcaaaccggttcttttcttttactttgaaaaggaaaacagaattatgatcttagccattgatataggcaacaccaccgtcgcccttgggggcatccgggacggacgtgtatgctttgtggcgcgcatggacacggtgcgcacccgcacggctgcggaatatcgtgccgagatggataaaatttttgcgcaccgccgccacccggagcgccccatgcgctttgagggggcggtgctcaccagcgtagtgccccagatcaccggggcactggccgactgcgcccgtcactacaccggcaaaaagccggtcatcgtttcgccggacatccgcaccgggctgaccatgggggtggacgagccccgcgccgtgggcaaggaccggctggtggatgccgcctacgcggcggcaaactttccgctgccggtcatcacggtagaccttggcaccgccaccacctttaatgtggtggacaaagaccgggtgttccggggcggcgtgatctgtcccggcctttccaccgggctgcgcgcactgggcgagcgctgcgcccagctgccgcaggtgcatctgggctccccgaaaaaagccatcggcaccaataccgaaagctgtatgctgtccggctcggtgctgggcactgccgtactcattgacggcatggtgcagcgcattgaggaggagctgggcagcccggctacgctggtggtcaccggcgggctggcaaaatacgtcaccccgctgtgccgccaccccctggcctatgacccggagctgctgatgaaggggctggcattgctgtaccagctgaacgccccgcaggagcacggccgcagccatggcggcggcagacactacggtcagcagggacgcccccgggcaaagcacccgtaccccaaccgccgcacccgccgcgagccggagacgctggtaggctgaggggacaagaggataagggagagcattatgaaactgggcattcttggcacgggtaaaatcgtgcaggaatttttgccatggcttgtggagcacacgccgtttactgtgcaggcggtgtgcagcaccccacgctcggcggcaaaagccgcagagctgtgtgcgcaatatcagatcccacagcacaccaccaattactttgagctgctgcaatgggtagacgtggtctacattgccgtgcccaatttgcagcacgcccgttacgcccgggtggcgctggaggcgggcaagcacgtcattgtggaaaagcccatggcggtgaccgccgccgagaccgaggaactggcagcgctggcacagcgcaagcggctgttcctctttgaggcgatgaccacccagtaccagcccaactacgccaaactccgggagctgctgccccgggttggcacagtgcgcatggtacagtgcagcttcagccagtattccagccggtacgatgccttttgcgccgggcagaccccgccggtgttcgacccgctgtgcgcgggcggcgcactgatggacttgggcgtgtacaacgtcagctacatcgtaggtctgttcggtgagcccaacaaggcggtgtatgccgccaacatggagcgcaacatcgacaccagcggtgtgctgatgatggattacagcggcttcaaggcgataagccttgccgccaaggactgcgcagcccctgcccgctgcatcattcagggcacaaagggctacattctgcaaaaatccaccccgaactactgcggcggcgtgaccttccaccccaacgagggcaaggaggagcactataatctgaacggggaccgtccccggcaggcggcagagttcgaggccttttaccgcgccatgaccaccggagatcaggagctgtgcgcccggatgctggacaccagcatcgcggtgagccgggtgctcacggtggcgcgccgcagcgccggggtgcgcttccccggcgacagattttaacgcatttttctctggaacacgccctgacacaataacgcgcttccaagagatttgaatattcacctaaaacccgcacagagcgggcagatttgcgccgtatccgacaaaaagggcggaacggcagcaggaggaaaactgaattatgaacaataccaatactaagacgctgactcgtgtggccctgctggtggccattgaagtggtaatgaagcttgtcggtctgggcagtgtgcccatgggtccgctgtacatgagcttcctcacccttcccatcgctgtgggcgccatcaccatgggtcccgccgtgggtgccctgctgggcggcgtgttcggcgctgtgagcttctacgatgccatcaccggcgcatctgccatgaccggcgcactgtttcaggtcagcccgctgaacacctttatcctgtgcgtgggtatgcgtgtgctcatgggtctgtgctgcggcctgatcttcaagggcctgcagaagctggataagtcccgcacttggagctacatcgtcagcgccatgaccgcacccgccctgaacaccctgttcttcatgggctacatcgtgctggctttctacggctgcgactatgtgcagaatctggtgtccgtcaagggcgctgccaaccccttcatgttcgtggtgctgctggttggtgtgcagggcgtagccgagtttctggtgtccggcattctgggcggcatcgtcgcccgcgccgtggcaaagttcctgaagtaagaccggctgcgcaccatgtcagggcggcgcatccgtgtttagaatagaaaaatgaatgctcctccggcaacccgccgggggagttttttgttggtagacttagaaagacccccctcaggctcactgcgttcgccagattcccccttttgtcacctacggtgacaaaagggggagtgtggcatcgccgcaggcgatgacggaaggggtgccccgcaacgcggagcgcattcaaaattgtccccctcacgcattttcatcttcctgcataggatggcgcacagcggaaaaggggagatgacggcatgagacagacaaagcggtttgcggtggtgggcagcgatgcccggcaggcagcggcagggcgtgcactggcgcgggcagggtatacggtgggcggcgtgcagcagctgccgcaggcagactgcatcctgctgccgctcccgctggaacagtccggtctgccgctggcgcagctgctgggcgcggcaaagcccggtgcgctggcgctgggcggcaaggtaacggacagtgcaaggaccattgcccgggcggcaggggtggagctggtggattactttgcccgcccggagctgactgtgtataatgccatccccaccgctgagggctgcatcggcattttgctggaacggcgcagccgtaccctgtggggcgcggcggtgctggtgctgggttttggcccggtggggcgggcgctggcggtgcgtctggcggcgctgggtgcgcgggtgaccgtggcggcacgccgtccggtgcagcgagcgatggcggaggagcttgggttgcgggcggtgccgctgacagagcttgccgcagaagctgccgcctttgatacggtggtgaacaccatccccgcgccggtgctgacggcacaggtgctggcagcgctgccaaagaaaagtctgatcgtagatctggcttccaagcccggcggcacagactttgccgccgcccggcggctgggacacacggcgctgcacgcgctgagcctgccgacggtctgggcaccggaaacggcaggggaggcgctggcacgcacggtgcaagccattttgcaggagcgggagggaacggtatgaccacagagaaaaagggctgtcttgcctttgcagtgtgcggcagcttttgcacgctggaggatgccttgggtgcggcgcaggcactgacggcacagggctggacgctgctgcccattatgagctttgccgcgcagcaggatacccggtttggcaccggggaaagctggcggcagcggttgcaggccgttaccgggcaaccggtgctggacaccctgcaggcggtggagccgctgggtccccggcggctggcgcaggcgctggtggtcgccccctgcaccggcgcaacgctggcgcggctggcggcagggctttcggatacgccggtgacccttgctgccaaaagcctgctgcgggtgggcagcccggtggtgctggcagtttccaccaacgatggccttggcgcttccggcgaaaacatggcgcggctgtgccagcgcaagcactattattttgtgccctacgggcaggatgacccctttgccaagccccagagcctgaaggcagatcttgccctgctgcccgccgccgtggacgctgctttgcggggtgagcagctgcagccggtgctgctggggcaaaggaatgcgtaaatcccttttcagcggggaaaaaatgtggtatactccaaatgatgccttgccggcataaaactgataagcggagaataccagatgaaaaaatttaccgcagcactgtgcactgtgctgcttttgataggcactgtgctggtgcccggcgcggcagcagccggcccggcgctggccaatacccgggcatactgcatcgtggatgcggataccggccttgtgctggcgcagcagaatatggacgaagagctgcacccggcctccattaccaaggtgatgacccttggtcttgcctgcgaaaaggcacagggggactgggatgatgtaaagctgaccgtgagccacgaggatgtctattcgctggcgggcacagattccagccatatcgccctgcgggaaggggaggaagtccccttggtggatgcgctgtacgctacccagatggccagcgccaacgatggtgccaacctgctggcagagtattttggcggcggcaccatcgcggacggcgtggcggccatgaatgcacaggtggaggagcttggtcttgcccacacccacttttcaaacccccacggcatcagcgatgaggatcactacaccagctgctacgatatggcgcagattttgcgctgggcgctgcagcagccggggtttgaggatgtgttcacccgcaacaagatgtacaccatgcagtccaccaacatccagccggtgatccgttacttctcccagcaggataagatccgcatcggctccagccgctaccacatcggcagcgtgctgggctccaagctgggctacaccaacaccgcccggtacagctatgtctgtctggcggagcaggacggggtgcggctgatctgtgtgacgatgcaaagccagctgagcaccgacaaatataatgatgtgcgcaccctgctggactacgcctttgccacctataaaagctacacccagctgcccggcggcagcgttaccgcacagctggcagtggcgggcggcgggcagagccttggtacggtcacggtggccgaccccggggtgaagctgctgctggccgagggcttatccgcgcaggatgtgaccgtggatttggaactgccggagcagtatctgctgggcgcagaacccgccgtgtatgcggtgtacaccctgaacggcggcgcaaagcaggagagtaccagcgtgcgggtgaaggccgagatcaccggtcttgccgagctgctggagcagagcgccggcaaaaagctggatactgccaaggacgtggagccgggcagcagcgcatggctgctggcgggcatctcggtggggtgtaccataggcgcagccgtggtcacggtgctggtgctgcggctgcacgcccgcctgaaaaagcgccgcaaaacggcaaagcaccataacaaagcgtaaaagcctgttttaaaccagacttttccagataaagaaaaaactttcagaaaaaaagagaggtacaatatcatgggcaagtttatttttacgcagaccgagatccccggcgtggtggtcattgagccgcaggtgttcggcgatgaccgcggctattttatggagacctaccagaaggaccagttcgcagaggccggcatcgacaaggaattcgtgcaggacaaccagagccgctccacccggggcgtgctgcgcgggctgcacttccagaagaaccacacccaaggcaagctggtgcgcgtgaccaagggtgaggtgtatgatgtggctgtggactgccgtccccacagcgctacctttggcaagtgggtgggcgtcaccctctccgaggacaacaagaagatgttctatatcccggagggctttgcccatggttttctggtgctgagcgatgtggcagagttctgctacaagtgcaccgatgtctacgaccccaccagcgagggcggcatcccctacgacgaccccaccgtcaacgtgcagtggccggactgcggctgcgagcacaagaccagcgcaaaggacaagctgcacgagccctttgccgcccagaagttcgagtattttgaaaagtggtgatcgcccgtggcaaaactcaaagggatgtggaacggcttctggcgctaccgctatctgctgtggaaccttgtaagccgtgatttcaagctgaaataccgccgcagcgtgctgggcgtggtgtggagcgttttgaacccgctgctgatgtgccttgtgtactgggcggtgttcagcagcctgatggatatgcggggcagcggcatcgacaactttgccgtctttctgatgtgcggtcagctgctgttcaacttcttcaacgaagctacctccaccagcatgagcagcgtgctcagcgccgccccgctgctgaaaaaggtgtatatccccaagtatatcttcccgctggaaaaatgctgttttgccatggtgaactgcgtgttcagctttgtggcgctgctgctggtcatgatctttaccggtgcgcccttccatctgactatttttgaggcgctgtacccgctggtgaccttgttcttcttcagtctcggggtcagtatgttcctagcggcggcgactgtgttcttccgggatatcatgcacatctggagcgtgttcgtcaccgcgctgctgtatttttccgccatcttctacgacccaacccagatgaccttttccatcggcggcttcaatatgcagcagatcatcaagctgaaccccatgtactggtatatcacgggcttccgccgcacggtgatgtggggcatcccgctggacgggaatatgttccttgtctgcggcatctgcgccgtagtgtccatggtggcggggctgtggatgttccgcaaaacgcaggaccgctttgtgctgcacatttaaggaggggtgaacaatggaaccgatcatcaaagtggacaatgtttccatgtgcttcaacctttccaaggaaaagcatgagagcctgaaagagtactttctggccatggtgcagggacggctgcagtacgacgagttctacgctttaaaggacgtcagtctggacattatgcccggcgatttttacggccttgtgggcttgaacggctcgggcaaatccaccctgctcaagaccattgccggggtgtacaagcccagcaagggcaaggtgaccgtaaacggcaccattgccccgctcattgagctgggcgcgggctttgatatggacctgaccgcccgcgagaatatctacctcaacggcacggtgctgggcttctcgcccaagtatctggacgaaaaatttgacgagatcgtggaattcagcgagctggaaaattttctggatgtgccgctgaaaaactactcctccggcatggtggcgcgcatcggctttgccattgccaccatcaccaagcccgatatcctcattgcggacgaggtgctgtcggtgggtgatttcctgttccagcagaagtgcgaaaagcggatgcaggagctgatggcgggcggcaccacggtcattctggtgtcccactccatcgagcagatcgagcggatgtgcaccaaggtggcatggctgagccacggccacctgaaaatgaacggggacaccgcaacagtctgcgccgcctacaaggcgactcagcgcggcgaggtctgatatgaacgtacggttgaaacgcgccaaggagcttgtcggctatgctgtgcagctgacaaaggacgagggtctgtccaccatggtcatgcgcggcgcgggctttgtcaagcgccgctgcttcggcaagcgtgcacgctacctgcccactaaaaaggtgctggaagcgcagcgcgcagagctggcgggcaaaacggcagcagactgcggcctgcccaccatctcggtgctgaccccgctgtataatacccctgaaaaatacctgcgggagtttctggattcctttgcggggcagactgcgcccaacgggcagctctgccttgccgatgcttcggacgccgcccacggggacgtggaacgggtcgtaaaggaatatcagcaaaaaaatcaacagatcgtatacaaaaagatcgaaaatcagggcattgccgccaacaccaacgctgccgcgcagctggcaataggggaatatctggcgctggcagaccacgacgacattctggcaccccatgctttgtataccatgggcaaggccatcctgcagctgcggcagcgcggagaaccggacggttttctgtacagcgacgaagcactgttcgccaagagcatccgccgccccatggtggcgcactttaagccggactacgccccggactacctgctgtgctgcaactacatctgccatctggcggtgtttaaaaagacactgtgggagcagctgggcggcgagcgccctgaatgcgatggcagtcaggaccacgatctgttcctgcggctgctggaaaagaccggcggtgccgcccatgtgccgcaggtgctctactactggcgggtgcacgcggggtctacctccggtggtgccgatgccaagccctatgtggcggcagcggctaaaaaggcgctggcagaccacctgacccgcaccgggcgcaccggcacggtggaggacggcctgttccccagcacctaccgggtgaagtgggacatcgtgggcgaaccgaaggtaagcatcctcatccccaataaggaccacaccgaggacttggaaaagtgcctgcacagcatctggacaaagaccgaatgggagcactttgaggtcatcgtagtggagaacaactccaccgaccccgccacctttgcctactataaaaaggcgcagcagcgctacgacggcttgcgggtggtcacctacccgaaaaagggcttcaacttttccggcatcaacaactttggccgcaagtacgccaccggcgagtatctgctgctgctgaacaacgatgtggaggtgcgcagcggcgaatggctcactgaacttctgcgccaatgcgcccaccccggcggggcggcagtgtgcggtgccatgctcttttacccggacgagaccatccagcacgcgggcgtcattaccgggctggggggctacgcggggcacagccacaagtacaaaaaggccggcggcagcggctatctgttccgcaccgccacggtgcaggacttttccgctgtgaccggtgcctgcctgctggtaaagaccagtgtgtgggacgaggtaaaggggctggacgaagcctttgcggtggccttcaacgatgtggacttctgcctgcgggtgcgggatgcgggctaccgcattgcgtggacgccctacgcccagctgacccactacgagagcaagagccgcggcggggacgaaaaagacccggtaaaggcacggcgctttgccgccgagcagcagcgtctgtacgaggtgcacggcaaggcgaacatcctgcacgacccctactacaaccccaacctgaccatggaccgggaggatttttccgaaagcgatgatctgcgcgggctgaaagagggacgcatcacggtgcagtggagggaataacagcatgaacatcaaaggtcatttcgagaccatcacccggcacaagctgctggtgatgaaatactgctttgaatgcgggttgtatgagcagggtcttgcccacgacctgagcaaatacagccctaccgagttcatccccgggtgcatctactatcagggcgaccacagccccaacgaggccgagcgcgcagccaagggctacacctcggcgtggctgcaccacaaggggcgcaacaagcatcatctggaatactggatcgattacagcaccaccaagaccggcctgaccggcatgaagatccccctgcggtacgtctgcgagatggtgtgcgaccgggtagcggcaagccagatctatctgggcgacaaatacaccgatgcttccgcgtgggagtactaccagcgtagcaaggatcactacctgatgcacccggagacccgggcactgctggaaaagctgctgtgcatggtgcgggacctcgggcgggagcgcacctttgcctacatgaaattcctgcttggctgcgagaccgattactgagcatttttgcgcaaacgccgctgacaaaaagtcggcggcgtttttgtataaatcgcgtattgacaaaaatattcaggagagggtaaactaaaatcagtcaaaccgaaagggttcggtttggtgtgtactttacttacctatatctattgaatcaggaggaatgtaacatgaaactgttcaaaaagattgcagcgatcgcagtggcaactgtgatgatgttctccatggtgggctgcggtgcacaaaaagcaggtatcagccagaaggatgatattatgaacatcctcgaggatactgcaactattatgggtggtgagtttacccacgataagaaactggatgatgttgcacaggctctgattgtcgaagcagataaggcatacaaagagggcaaaactgtacaggaactgctgaccaatgatgaagtagcaaaggctgctggtatcgacaccgcaaaagaaggttatatgatgtctgttaccaagaattacacctttaagagcgatgtcatgaatcagcagaaaaacacgatgctggcgactcggctgattgaaggcaccagcgaaaacttgcaggtcggcaagcccgccgcgatcaataagggtaaagcaatcacaggtattgcgatcggtaagatcggcggtcaggagtatatcgttctgatcgctgcggcaccggcacaggcaaagtaaaaaaacaatactaaaacagtcccctgtgcgtcgggcttgtgcctgctgcacaggggactatttatgaacaaatgcaaaaacaccccggccgggcggttttaccgcctgaccggggtgttatttttgcaagaaaaatattactgctcgttttcgtagatcttgatatagcgcggagcgcttttatcctgccagaacagcaaaatggcggtcagggcgacagccagtgtggtgaggacggcgagcagagctttgagaactttcatggtttggtgcctccttgtgaagttcgggagcggagcgggggacgttccgcctgtcatgttagatatagtatagcatattcccgcagcaaaggcaaacggcagagaggggagaacaaaaagaaaaatacggtggttagttaaaactaatcgacgaaaacgaataagaaagttcaggaaaattcatcatttgagccgtgatgtcgttgacttcccgcgccaaaatgatacaataagtgtgttaagcagctgctgtccctgtaccagtgcgcctgcatgggcgaggggatggcaattcaagcagaatgggggatttgaaatccatgttgaacaagctgaaacgtgcggcgcttggcgcgcatacgccgcatgacaaggcaactgctgcaagcaaacctgtcccgatgcctctgcccgcgcaggtacgcatccttatgagccagcacattggcgcacccgccaaggcactggtgaaaaaaggcgatgaagtgttcgtcggcaccaagatcggtgaggcgggcggctttgtctccgcaaacatccactccagcgtttccggtacggtagctgcagtggaagctttccgtctgtccaatggccgtatgtgcgattctgttgtcatcaagaccgatggcaagcagaccgtagacccggctgtcaaggcaccggaagtcaccgataaggccagcttccttgccgccgtgcgcgagtgcggtctggtcggtctgggcggcgcaggcttccccaccgatgtgaaactgcagcccaagcagaaggtggataccctgctgatcaacgcctccgagtgcgaggtgtggctgaccagcgacacgcaggagatgctggagtgcagcgatgatatcatccgcggcatcaaggcggtgctgcagtataccggcatccccaagtgcatcattggtattgagaacaacaagcccgagtgcatcgacctgctgtgcaaaaagaccaaggacgacagcaccatcgaagtcaagcccctgcccagtgtttacggcaccggcgcagagctgatcctcattgagaagtgcctcggccgcgaggtgccccacggcggtctgcccgccgatgcaggcgccatcgtgatgaacgtgaccagtgtttccacgctgggcaagtatctggctaccggtatgccggtggttcagcgtaccatcaccgtggacggcgatgcctgcgcaaagccccagaatgttgttgtgcccgtgggcaccgcttatcaggacattctggactatgtgggcgtgaagggcgagctgggcaaggtggttgccggcggtgccatgatgggccccgctgtggagaacctttcctaccccaccaccaagaccacttccggtctgatcctgctgagcaaggcagctgcacagcccgcacaggtcaacccctgcatccgctgcggccgctgcgtggagtactgccccatgggtctggagcccgtggaggtcaatcaggcctacgccgcccgcgatgtgcaggagctgggcaagctgcacgctgactactgcttcaactgcggcagctgctccttcgtctgcccggcaaagcgcccggtcacccagatgatgagtctggccaaggccttctatcttggcgaaatcaaaaaaggaggcaataagtaatggatacgaagcttattgtttcggcttccccgcacgtccgcagtgacgagaccacccagagcctgatggctaacgtgatcgttgcactgtgcccctgcgtggttgcctctgcgatcattttcggcgtgcgcgccctgctggttaccgccgtttccgtggtggcctgtgtggcctttgagtggctgtactgcaagctgctgaagcgcccgaaccccatcagcgacctgtccgctgtggtcaccggcatcattcttgccatgaacgtgcccgtgggtatgcccatcggtcagctgatcatcggcgatctggtggctatcatcgttgtcaagcagctgttcggcggcattggcatgaactttgcaaaccccgctctggtgggccgtatcgtgctgttcatcagctttgccggctccatgaacaagtgggtattcccggatgcagcggtggatcagctgtccaaggctaccccgctggctgtggcagatccttccaagctgagcctgctggatctgttcatgggcatccacggcggtgtgctgggcgagacctgcgcactggctatcgtgctgggtcttatctatctggtggctaccaagaccatcagcatcgccattccggcttcctacgttggcagcgtgttcgtgttctacctgatcgctaccaaggatctgcacagcgcactggttgccgtgctgagcggcggcctgctgttcggcgctgtgttcatggctaccgactacgttaccagcccctttaccctgaagggtaagctggtgtacggcgtgtgccttggcatcgttacctttgccatccgctactggggcagctacaccgagggcgtgtccttcgcactgctgttcatgaacctgtgggtcccgtacatcaatgatctgacccgtcagaccccgtatggctatgtgaagcctgcaaagaaagcgaaggagggtgctggcaaatgagtaagactgcaaattccagctgggaaaccaccggtaagccgatcgttgtgctgaccgttatctctctgatcgtcagcctgctgctggctctggtgaacggcatgaccgctcccgttatcaaggagaacacccgccgcaccaccctggctgcttatgtcagcgtgatgccctctgtttcggacgcagctacgctggaggaagttaccgattacaccaccgccaatgttaccggcgtggtaaaggctcccgatggcggcattgccatcaaggctgaggaaaagggctttgacggcggcatcctgaccgtgatcatgggctttgatgccaacggtgccgagaccggcatttgggtggacgcttctacccagaccaagggcatcggctccaatgtgtccaccgatgacttcctggcacagttcaacggcatggacggcaccaagaacattgtgatgaatcaggatttcgatgcgtacagtggcgcaaccatttcgtccaccgctctgtttgctgccatcaatgattgtatcaactgcttcaacgagctggcataaaaggaggttggtaagaaatggcacaagaaaataagtccaaggtaagcatccttaccaacggcatcatcaaagaaaaccctgttctgcgtctggttctgggcacctgctccattctggccgttaccacggcagtttccagcgcactgggcatgggcgccgccttcaccttcgtgctggtgtgctccaatatcatgatctccctgctgcggaaagttatccccggcaaggtgcatctgccctgctacatcgttatcattgcaggctttgtgaccatcgtgcagatgttcatgcaggcctacatggaaagcctgtacaacgcactgggcgtgttcctgcccctgatcgttgtcaactgtatcattctgggccgtgccgagatgttcgcctgcaagaacaatgtggtggattccgcactggacggcgtgggcatgggcctcggctacaccctcaccgctactctgatggcctccatccgtgagatcctgggcagcggcacctggctgggcttccagatcattccggaaagcgttgccaaggtgtccatcatgacgcaggctcccggtgcattcttctgctacggcatcctgatggcaggctgcatctggctggaaggcaagctggacgcccgtatcgagcgcaagagctgctgtgatcttgacaatctgaagaaggaggcggaataagatgctcgtcaaactcgctgcgatcttcttcagcatgatccttgtcaacaactatgtgctggtgaagttctacggtatctgcccgttcctgggcgtttccaaaaagctggattccgctgttggtatgtccggtgctgtcatctttgtcatgttcatggcaacggccgttaccttccccatccagatcttcattctggaccaggctggtctgagctacctgcagaccatcgtgttcattctggtcatcgctgtgctggtgcagttcatcgagatcttcctcaagaagtacgtcgttgcactgtataactcgctgggcgtttatctgcccctgatcaccaccaactgctgcgtgctggccgttaccattctggtcgtgggcgactacggcgcagatgtggctgcacacggcttcggctacgcctacatcgaggctctgatctgcgccatcggcgcaggctgcggctttatgctggccatggtcatgttcagcggcgtgcgtaagcgcgtggaagcctgcgatcccccggcacccttcaagggcctgcccatcaccttggtcgcagctgcaatcaccagcctgtccttcatgggcttcggcggcatcgtcgaaaacctgttcaatgttacgctgtaagggaggaacaggactatgaatattgtatctgctgttatcctgtgcaccatcgtgggcgctgtgggtgccatcattctggtggctgccgcaaagttcatggcggtggaggaagacccccgcattgaggaagtttctgcctgtctggccggcgcaaactgcggcggctgcggctacgccggctgtgccgactacgccaaggcggttgttctggacggcgtgccctgcgacaagtgcgcacccggcggccccaaggctgctgctgccattgccaagatcatgggcggcgaggcaagcgccgtagagaagaaggctgttgtgcagtgtcagggcagctccgagcactgcaagcctgcctacgactacaagggcatccagacctgcgctgctgcggcagctctgtacggcggccccaagacctgctccttcgcctgcatcggtctgggcgactgcaccaaggtgtgtaagttcgacgccatccacatcgtggacggtgtggccaaggtggacaaggacaaatgcaccggctgtggtgcctgcgccaacatctgccccaagcaggtgatcatgatcgatgctgccggcccccgcaagccggtggtcatgtgctccaacaaggacaagggtgctgtggcaaacaagctgtgcaccacctcctgcatcgcctgcggtatgtgcgagcgcacctgtaagtttgacgccatccacgttgtggacggtgtggcacgcgttgattacgacaagtgcaagggctgcggtatgtgcgcccagaagtgccccaagcacatcatcctgttcccgctgaaggacgaccccaatcccccgaagcccgtggtgaagcccgccgctcctgctgctgcacccgcagcaaagccggaagccaaggctgagacaaagcccgagaccaaggcagagtaaactgtaaaccaaagcccgccgtgcagcaatgcccggcgggctttttgtatagaaaatgattggaaatgccctccgcttgcgctctgggcatcttcagcggaaaaatcatttttaatttcgcgtttgtcgcgctctgcggagcgctccaaacgcttttttcacgagaggggctgtgacggaaaaatgcattttgtctctgcgacccttcttgtgaaaatggcagaacggaacgcccgcaggcgttccgttctgtcgagatataaaatattctttccttaaattatgcccagagcgcaagcggagggcattttaaatcgtccgaacccggtgggctttttgcaactttttgtaagaaaatccggttgcaaagccgcgaaaatatggttaaatagaaaaaggatatttccgcaaagagaggaacaacatggaacaacagaacacacgcctgcgcaatgcgggctttgcaacctttttcttcagcggcatctgcgctatcagcgcaggtgtggtggtcagtctgctgcaggagcgctacggctttgcctacggtatgaccggtacgctgctctccctgatgagcgtgggcaacctgctggcaggtctgctgatggggatgctgcccagtgcgctgggcatgaagcgcagcgtgctgctgctgaccatcggctacgcggtgggctacgccatcatggggctgaccggcgcagtggcgctgctggcggtggccttttttgtggtgggcatcgccaagggcagcgtgatcaatacctgcaccattctggtcagcgacaactccgccgaccgcacccggggcatgaatctgatgcacagctgctacgcctgcggtgcgctgctgtgccccttcctcatcgcggcagcagcccgggtaagcaccgagctggccgtgtttctgctggcagccatgggtcttgtactctggctggtatacgtttttaccccgctgcacggcggtaagagcaaaagcagcacagagaaggaagccatcgactggagctttctgcggtctgcccgcttctggctgctgaccggtctgctgttcttccagaatgccgccgagcagagcgtcaacggctggatggtgacctacttcaagggcagcggcatcattgcgggcacgctggcggcctataccgtcaccgtgatgtggggcgctacgctggtgggacggctgctcatcgcctttgtattcccctttaaaaagccccgcaaggccatggtgggtatgagcgtgctgtgcactgtgttctatgtgctgctggtgatggcgcacacgcagggcgcagccatcgcgctgctgttcgcctttgccatctcgatgtccggcctgaaccccactgccgtggccagtgcgggccgcatgaccagcgtgaccagcatgggtatcatgctgccggtggcttccagcggcgccatcctgatgccgtggatcatcggcatggtggccgagcgcgccggccttgccgccggtatggcgtccaacatcgtgccctgcgtggggctggtggtctttgccattctggtggcaaagctgccggaggaataaacaaaaagcccatccgcacactttgccgtgcggatgggctttctttgcgttatccctcgatccctcttgcctttgcgctgaactcgcagccgcagtagtcctgccggtacagaccgtactgctccgaaagctgcaggctgcgcagatagccgttgtgctttttgaagtccgagggcagatgcttgaccccgaattctgtctccagttcctgcccgatggcgttgatgcgcgcagcgtccttgtgggggctgatggacagggtggtggtgaaccagtcaaagccgttgtcccgggcgtactgcgctgcacggcgcatccgcagccggtagcagacggtgcagcggctgccgcgctccggctcattttccagcccggcgacagcggtgtagaactgctgcgggtcgtaagtgtcctccaccacggtcacgccaagcgggtgtgctgccgccacgaacttctgcagttcctcgccccggcggtggtattctgctgccggccatgtgttggggttgtagtacagcaccgtgatctcaaaataccggcacagctgctccagcacggcactggagcaggggccgcagcaggcgtggagcaaaaggcgcgggcgggcatcgccaagacccgccagcacggcgtccatctgctgggcatagttgcgttgtgttgccattggtatcatcctttgctataatggtcttgcctacattataacatattttacgatgaaatacaggaggttcccttatgacggaagaaaagatcgcccgcatcaatgcgctggcccaaaaaagcaagaccaccggtctgaccgaggccgaaaaggctgaacagcaggcactgcggcaggagtatctggctgacatcaaggccagcctgcgcagccagctggagcgcacgtccattcaggagccggacggcaccatccataaggtgacccgccgcaccgacctgaccggggaacgcagctgaaagcaggacgatttggagtgcgctctgcgtatgctcagcagaaagaatattttgatttcggggttcgggaacgcctgcgggcatttctggaccctattttcacagcaggggtcgtcgttgctgttcaagtcctcttatctgctgttacagctgaagagggagtatacagtgaaataaatcagcaacagtcctcccggtagacattcctataggttggaaaccgcgcactaacaaaagccccactggggcttttgttgccccacctgcggcggggccgtgctgttcaagtcctcttatccgctgttgctgttaaagagaaattgccgtataaaacaaaaaaaagacagctatcaaaagctgtctctcttgtggtgcacctcgcgcactcatatccgaacttttctccgctttcacagcttccccgaaagcgaccgtttctgtaccttccttatagttaaaggtaatgagaaccttatcatcatagagatagatggcattgatgaaggtatccactagtgcctgccgctgctccggctgggtcatatccagcttgcggaaacgaagcagccaaaaccggacgaattcttctttcatcttcggcttggcaagccgttcctccgcaatgcgggcttgcaattccttccgctgctcttccagagcttccagccgctccttggtggagctggtcagaatgcccatctggatggcattcagcatattggtgatgccgacttccgtttccttcaactgcttttcgtagatgggcaaatccgtgctttcctgattttgcagctccatcactttggcgatgatggcattcatggaagcatcgtcttccaccagtttcatggtctcgttgacaaccagatcttccagccactgtttccgcacggcctttttatcgcaggtctttttcttcttggcagcagcacacttataataggtgtacatcttcccggtgtggctgacaccgctttcgccaaacatcagcgctccgcacttaccacagtacagcttggtggtaagcagatagctttcctctgccttatgacgggcaggggcctttttatttttcgccagcttttcctgtactttgttgaacaagtcctctgacacaagagccgggatcgcattgggctgtaccacatccctcaaacgcaactcgccgatgtaccgtcgattgctcagcatccgctgaatcgtgttataggacatctccccgcccatcgagttcttaatgttgtgcgcctttaaccaatccctcaggtcagtcatggtcgcaccgtccgcatacttctggaacgtctgctccacatacggtgccaacaacgggtcgggctggtaatgccgggtctcatcgatcatgtagccgaacggaatcgtgccgccattataaatacccttgagagcattttcggtcatgccgcgcacgaccttttcagacaggtcagccgagtagtattcggcgtagccttccagcaccgattccagaatgatgccctccgggccagccgagataacttccgttgccgacaccagtttcacgccgttccgcttcagttgagtcttgtaccgggcactgtcgtagcggttccgggcaaagcggtccagcttccagacaatgatgacatcaaagatgccacgttcgctgtccttgatcatctgctggaactgcgggcggttgtccgtttttgcagaaacggcacggtcaatgtagtgcttgaccaccgtgaagccgttcttctccgcataggccgtgcattcccgaatctgaccttcgatggattcttcacgctgattgtcgctggaataacgggcgtagatcacggcagtcatggcaggcacctcccatttatacatcattgaacggtagagcgttctttcaaagcaatgtttcgtataatggatataccacattttgtgagaaaaagcaagatactattttcacttctgtgcacactaaataaaaatatcccggtcattcccttgcgcccagcagagagaatgaccgggatattttacttataaaatcgttctttcatcatgccgttttgggctggtctgtcggtttcttctggggcttcataccccagaacacagcgttcatggccaccacaatgagggccaccaccgccatagacacccagaagcccagatcaaggcccagccagtgggtggtgccgaatacggtcatccaaagttcattccagttcatgggttttcctcctttacagcagctcgccatagtggcggacgtaggcttttttcaggctggtggcaagcaccatatacagcaggatgcaggggatcaggtaggcaaagtaggcggcaggcagggccacaaagcccagtgccgtgccaaagggggtaaaggggatgatggtcagcaccgcaatgccggtcatggtcagcagggtcaccggagcggaagcccggctctggatgaatggcagcttgggggtgcggatcatgtggataaccagcgtctggctccacatggactccacgaaccacccagcctggaacatcccgatgtattttgcctgcatcagagccagctgtgccccactgtaatgagccgccagatcgttgaacagcacgccgccggacacgaacagcgggcagaacacaaagtacatgaaaatataagtcgtgaagtcgaagatagagctggtgggtccgatccagatcataaagctgcccacgctggaagcatcccatttccggggcttggcgataaactcctcgtccacgttatcccacgggatggcggtgcaggagaggtcgtagatgaggttcaggaaaatgaggtggacgctcatcatgggcaggaagggcagcagcgccgaggctgccagcaccgagaacatattgccaaagttggagctggccgtcattttgatgtacttgatcatgttggcgtaggtcttgcgcccctcgatgattccctgctccagcaccatcaggtctttttccagcaggatgatgtctgctgactcctttgccacgtccacggcggtgtccaccgagatgccgatatcggcggctttcatggcggcggcatcgttgataccgtcccccataaagcccacggtatggccgttttcccgtaagacggacaccacccgcgccttctggtcgggcgtgagcttggcaaacacatcagtgctctctgctgcccgtgccagctctgcatcggacatgtgatccagatccgagcccagaagcatattgcgcacctttagccccacctgcttgcagatggtgcgagtgaccttgtcgttgtcgccggtaaggattttagtggtgacaccgtggtctttcagtgcccggatggcatcggcggtggactccttgggcgggtcgaggaaagccagataacccagcagcaccatgtcccgctcgtcctttacgccaaaggcatccaccggggaggggttgctcttctgggcaatggccagcacccggaagcccttgtcgttcagctcgtccacggtatgcagaattttgctgcgcagggcatcggtcagaggctctaccctgccatcctgctcggcgtaggcgcagatggcaagcatttcctctactgcacctttggtcaccatctgggtcttgccagccttatcctgcaccacggtggtcagacggcggcgggtgaagtcgaaggggatctcatccaccttcacatagttctcggacagatcgagcagtcgggcgtctgcggcttcttcctcctcggttttgtggatgatggcaaggtccatcaagttcttgtatccggtctggaagtagctgttcaggtaggcgtggcgcagcacacgggtgtcgttttcgccgttgacgttcaggtgatattccagcaccaccttatcctgcgtcagggtgccagtcttgtcggtgcagaggatgtcaatggcaccaaagttctggatagagttcaggtttttcacgatggtctgctttttgctcatggagaccgcaccttttgcaaggcaggtggtcacgatcatgggcagcatctccggggtaagccccacggcgatggagatgccgaacaaaaatgcttccagccagtcgcccttggtgaggccgttgatgaagaacaccagcggcaccatgaccatcataaaacgaatcagcacccacgaaacggcgttgacccccttggtgaagctagtctctaccgcctccccagccacggcagaggccatggagccgaagagggtctggtcgcccacgcagactgccacggcggtggcactgccggagatcacgttgctgcccataaaggcgatgtcggtgtagtcagtgacactgtcccggggagcactgactagcggggtcttttcaataggttcgctctcgccggtcaggctggcctgactgacgaacaggtcctttgcctccagaatgcggacgtccgccgggatcatatcgcccgccgagagatgcacgatatctcccaccaccagatcgtccatggggatttccaccttctcctgctcccgccgggtaaccatgcaggtggtggtgatcatggccagcagcttttccgccgcgttgccgctgcgggattcctgcacgaaccgcagggtgccggagatgagcaccatggtcaggatgatcacgaccgtcagcgggtcaaaatcctccggcgcactgcccagcaaggaaaaatacgggaacaccatatccgtcatggtggacaccagtgccagacagaacagaatggcggtaaaggggttgacgaaggctcccgccagacgctgcaccagcgatttctttttctcgtgggtcactttgttgctgccgtatttggcacggctggcggtcacggcatcctcatccagccctcggagggtggtgcggagattcttcatcacctcgccctcggggttggtggcggcgaactggatgcggcggttctgctcatcccggagcaccgcctttgctgccgcctgccgaacggccatgcggttttgttttttctgattcatcttcttgttcattgggttcacctctctactcactttttacgatacctctggcttttttcgatgtgccagacatcaaagcctgcgatgatcatccacgccaccatggctcccacgaaccagtggtctgaaaatccggcccaaaggcccttgagcaggaaaatgatgccgttcagcgcaatgatctccccgatgttgcggcaaagcggaacgatggcgatcttctctttttcttccgggggcatatttttccatgcagacagatgggagtgtccatttcctgtggcgaacacaaaaccgccaagggtgaagaggacaccaaaaaagatgcaggtgtaatccatagtcgttttctcctttccgatgtgctacattgacttccctcttccatcacaacacctcccaacctgcgctgatcacttccggcagcttcagtgcctgccctacgatgccttccagtacggtgcgcttggatttgcccgaagagcagtattccgcaaggatttccaccttgtctcccaccacatcgccgctttccagattggtcagatacagcgttttgcaggtgttgctttggatgagaagggcccgcagttcctgctctgctttttcctgacaggtgacagagatgcggtattgcttttcgttctcctctccggcagcgatggggttcacctttcttgcaaggggacgcaggatcaggttggagctgatgaggaggactgccgccgtcacggccatggcgtacatccccgtgctggccagaatgccgatggcagccgtacaccagagggtagcggcggtgttcattccccgcaccgagccgctgtccttaaaaatgacaccgctgcacaaaaagcccacgccggaaataatgctacttcccacacggaacacctgatcggagccatacagcatgggaaacagggtgaaaaagctggtacccatgcaaatcagaacattgatgcggatgcccgccgggtgcccggtcagctgccgttccagcccgatgagaaaccccagcaccatggagagggcaactctcaaaacaaaatccatgtagagcattcggctcacctccttccaacacccctagaatacaaaaatcgcaaggaagatcccatggccaaagccttgcgatttccttgcgattgagcaagatttatgattttttgcttacaactgatcgttgaacttatacccgatgccccaggtcgtcaggatgtagcggggtgcgtccgggtccggctcgatctttttccgcagtttgcggataaacgccatgatgttgctgtcatccagcaggtagttgtccgaccacaccgcccggtagatttgttctttggtaaacacctcgccccggttctgggccagaaaccagaggatgtcgaactccttgggggtcaggctgatttccctgccctgcatgagcacccggcggcttttaggaaagatttccagctcccctagctgcaagctctctgccggggcgggtgtttctccttccccggatgcgctcaacagcagagaggtcacctcccctcgcagcaagtcctgtacaccggcgcagagctctgcggcattgtcgctttccggcggctcctttgccagcatttccagcagccatgcaccaaggacggggtccatgggcacaaatccaatcttctttttcatggcagacccctcctttcaaatcagctgatggtgctttttttggtagaaggtctttaccaccgtggtcagcagcatatacgccagcgccaccaccaataaaaaaccgaagtaccagagagggagccttgtcagcccgaacagaccgccgcccttggtaaaagtgagcccggtaaagaccacgatgcccgcaagagtagtgaccatcaccggggcagaggggcggctctgcacaaaggggatgcggcgggttcgcaagaagtgcaggatgagcacctgtgtccacatggactccaagaaccatccggtctggaacagggcaacatagtgcagctgcatagccgggtcggtcaggtgaaggtaggtcaccccgccgcaaagcaccgggcacagaacgtagtacaaaaacaggaaggtcgcaatatcaaacaccgagctgatgggcccgaaggagagcatgaactgccccagcgtccggcccgaccaatcccgcggggaaagcgtttcctcttcatccacgttatcccacggcagaataatgcacaacacatcgtacaacagattcagcagcaaaagctgcaacgaggtcataggcaggaagggcaaaaacgcactggcgcagacaatggaaaggatgttgccaaaattggagctggcagtgatcttaatgtacttgagcatattggtaaaggttctgcgcccttccagaataccctcttccagcacaccgaggtctttttgcagcagcactacatctgcggcgtccttggcggcatccaccgccgtgtccactgagatgcccacattggcctcgcacagggccgggatgtcgttgatgccatcccccaggaagcccacggtatggtcattctgctctaaagccgacaccagccgcaccttctgccccggagtcagttctgcaaagacgtggacttcctccacggcggcagaaagagcactgtcggtcatttcgtccagctgcgcccccgtcagcaccctgcagcaggggatgcccacccggcggcagatggacaccgccacatccgcctgatctcccgtgagcacttttggggtcacctccagccgtttcagggcggcaatggaggcttttgcggtctttttgggggcatcgaaaaaggccagataccccaccagtgtcaggttttgctcatcggcaggggtgatgtgatccgcagcgtccatctctttttgtgccacggcgatgaccttcatgccgtcctgcagcatctcgctgaccaccgccgcaacgctctgcgctgtgccctcttccatgggcagcacctgcccccggtaggccacggtgctgcaccgggccaccacatgggaaacatctcccttcaggatgagctttccggtgccgtctgccgccgtcacaagggtgctgaccaccttccgggcatagtcaaagggaatttcatccgttttgcggtactgcgccagcagttctccgaagtgcgcctctcgccccggcatggtctggcaggccagcagggcattgtcgatggggttccgcaccccggagtggtaaaagctgttgaggaacgccaagtccagcgcctcggcactttcgttgcccagcacgtccatgtagtattccagcagaatgctctcgttggtcagggtgccggtcttgtccatgcacagcacgtccatgctgccaaagccctgcatggcgttgatgtccttgatgatggtttgtttgcggctcatggcaagactgccccgtgccagacaggcggtaatgaccatgggcagcatttccggcatcagccccaccgccaccgacagggcaaaggcaaaggattccagccagttgcccccagtaatacccagcagcaaaaacaccagcgggatcagcactcccataaaccgcagcatcacccatgcgatggaattggcacctttctgaaacgcctgtttttcctccgggtcgtccttggcaaagctaccgtaaagggtatttttgcccactgccaccacaacgccctcgcccttgccgctgatgacggtggtggccataaaggcgagattttccagttgggtcacggggcgggggctgccgtaggagagggtgcggcaagtcttttccaccacggcactttccccggtgatggcggcctgtgagagaaacaggtccgtgacagcggtgagccgcaggtcggccggtacccggtctcctgccgaaagcagcaccacatcccccaccaccagttcttctgccggaatgtctaggctctgaccgccccggcgtacccggatgcgctggtggatcagccggtccagctgccgggcggcgtttttggcgcgcagctcctgcaccagacggataccgccgctgatgaggatcatggaaaagatgatgagggcggtggtgacgtttttggaaaaatcggaggccagaaaaccatccgtcaccagcgaaatgcaccccagcacaaagaggatcacgttgaaggggttgatgaaggcccgccgcagccgccggagcatggtatcgctgcggcggctgccgaaacggttggagccgtatttttcccgctgcttctctacctgttccggggacaagcctgccggggagctgcccagctccccgtagagctgcgtcacctcccggtaggcgtatttcttgatgcggctgtcaaacagggtggtcttggacacagtgcgcccctcctctggtgtttatggatacttttattgtaacatggatgcgctgaaaatccaccggccgtttcttgtttttttcttgcgattgcagggaggatcaggcaaagatcgacgatgctgccgcatccgtgagatttcggggcattcttcaaggataagtcctactctctccactttatttccataaatttttcaaaaccctcttgacgaattctacatacggtggtattttccttgtaaatcccactgattttgtggattggtttgaaacaatccacaagatgtggtcgtgttcattttgaacacagccacagaaagtggttggttatcaccatgagacccaccatttccgtgaggaaaagtcctcgaaagaatttaccgccccgcaacacacccgattcattttgccgccgtttcacccgacaaaatccatcgctgcgctgcgtgggcggttttctctttttgtgggaaacgcaccttgaaaatttcatgagccgaccgaacgtgataccgactttccgtcaacgccgctgcacaaacaggggcaggaacttcgttcggagcaaacggtgaccccattacatgagcagcacaatctctacttattttttgcgtcttaacaattcggaaacatttgttgaaagttgattttgagcgcagcggtagagggcaagaaccgtcccgtggccacaaattttcaattcttgaaaatgttgtgttccaccgggacttcacttcttcaatgcgtctgcatttccgatgtgatcttgttggggcgtgcctgccccaaaccctgctcatggttcgcacctgacggtgcgaacagcaacggcgtgtcgtgcttacatagctccaccgaggagctagcgaaacgacaggaggttcaatgaacaaaacgaatgtcaaaacgaaacccagcacgacccaccgccacgacacgccgaacaacaaaacgcacatcatcaagttccgtgtgacggaaactgaaaagatggaactccaatgcacagcaaaactccttcatctctccctgtccaccctcatccgccgtgcgctgcacaatgcgaagatcgagcgcaccgttgtcgttgccggcggcggagaagaaaccctgactgccgtttccactctgcttgcccagtgcagcagggtgggcggcaacctgaaccaactcgcacgacacttcaactccggcggagcagacaccgaacagctccgggcgaaacttctggacgaacttgcagacctgactgccttccggctcaacgccgagaaagttctgggtaaactgtatggcaacgctgaagcatatcgcctctaaaaattcggactactctgccgctgagacctatctggtttaccagcacgatgaattttccggcaagaaaattctggatgaacagagcagacccaagctgcgggaatcgtacattctggacacccttgaatgcggcgaagcctcgtttgcaatggcctgcctgctggcaaaccggaagtacgacaagaacaaccacccggatgacatcaagagtcaccagtatatcatcagcttcgacccgcgggatgcagccgaaaatgggctgacgatggaaaaggcacaggccctcggcctgaacttctgcaaagagaactttcccggtcatcctgctatcgtctgcacccacccggacggacacaaccattcgggaaatatccatgtccacatcgtgatcggcagcgtccggacacgagaagtggagcgcaagccctatatgcaaaagccccgtgactggcgtgagggcatgaagcattccagcacagcccagaccatgcggcacctgcgtgtcgcagtcatggaaatgtgtcaggatgccaagctgtaccagatcgacctgctcagctcgaaaaagcgtgtgagcgagcgtgaatactggatgaaacggcgcagtcaaatgaaactcgaccgtgaaaacgctgccctgcttgccgccggacagcagcctacacaaacggagtttgaaaccgcaaaggagactttgcggaaacagatctcggatgtgctggacaatgcagcgagctttgaagatttctcggacaggctcttgcagcagtacggcatcacggtcaagaaaagccgtgggcggctcagctacctgccagccggaagaaagaagtttatccgggcgcacagcctcggtgacaagtttgagaaagaactcgtgcttgccaccttgaaagaaaatgccaagagccagcccattatcctccacagcaatcttgaggaaaaacccgaccgaatcaagaagctggtggacattcaggcaaaactgaagcagggcaagggcatcggctatgagcgttgggcgaagaagcacaacctcaaagccatggcgcagaccttgattcttttgcaggagaaaggtctgctcaacgaggacgcactcgaccagagaattgcagagcttgacaccaagttccatgaatcgctggccgtagtgaaagacctcgaaacccgcatggcaaacaaccaaacactgcgccgttatgctgcttcctacaagcagtaccgaccgctcgcgcagaaacggaacgctgccaaatcccccgcaacctttgaagaacagcatcgtgcagagctgacagcataccggacagcagcagcctatctcaaggcaaacaacatcactaaactgccaagtccgaacaagctggaagcggaatactgcgctcttgcttccgaaaaggcccagttctatgagcagtacaaggaagccaagatcgaactgctcaagctgaaagatgcaaaacagaatgttgccctgttcttccgggaggacgaacggacgcaacatcacgagagataaggagttgtgcgtatgatcaatctgaaaatcgacccggagttccagaatcagatcccgccgctgacggacgatgagtacaagcagcttgaagaaaacatcctcaaggaaggcaagctgctctctcctttgatcgtctggaacaacaccctcgttgacggccacaatcgttatgcaattctccagaagcacccggagatttgcttttccaccatgccgctccgatttgaaagcagagaagaagtcctcgcatggatctgcaagaatcagttggggcggcgcaacctcaccccggagcagaagctgttcctcatcgggaagcaatatgaagcggaaaaatcctctcatggcgaagcccgcaaagaatcgcatgatgaaaatggccgatttcaccggagttctcaaactgataactccggtgaagccatgaaaacctgcgaacgaatcgcagaggaaaatggtgtaagcaaggcaactgtacttcgcgcatcgaagtacatgaaaggtgttgaaattgctgaatccctgattcccggtatgcgggagaagattctgaacaaacaggtaaaagtcagcaaggctgatatgcaccgccttgcacgagccaactatgatgcccgcgcacagaccttgcaggaaatcctgcacccggaactgaaagttgaaccgaaaccggatgccgatggcatcatccgggaaccgggaaaggcacctgtattgccgtttcagaaaatcgaatcggtttacgacagcgatgcttacccggaagaagtgcggcatgattatgtcgcactggaacacgttacaacacgtttccgcacagagtttgactatcttctgagaactatgccagacacagcacagcgagaagtcattctcgaaatcatccacaagcacaaggagtaccttgcttcgctggaatctgcgctcgcagaggatgagcagacagcataacaacaggcacattgtatgctgtcaacagaaatccaaaggagtgtgcgtttgaacaaaaagaaaaagtccacaaatatttccccttaccccgatgaagccatcgaacgactggcacgggcattctatccggcgatccttgcctgctggaacagcgaggaaggtcaacgggaatttgctgcatggcaggcggaacaggctcatatcgcaaccaaagaaaaacaggaagttcccgtcggggaactccctgccttacttatcgtgtgtggatttttgcagggtgcgtccggcagggcgcaccctgtttttgcgttcagtcctctaatccgtgacttccagccgcatttctcagatactcctctggctcaccgttcaaaattagctctgcatacgccagcgggtcattgtagatgaggtagtccagttcagacctctgcgccatggtaacatccagtgcatcctcgacaccggtgcagttgatggaaattttgcgcccatcccggagcagcagctccacacagccggtgcccatgttaaactgacaggctcttgcatcgtacttcataatcttgcgtcccttctgccttacggcactcttactgttgtgaccttcgtgatacggtctttcttctgataaggttttggacacacagccgtaagggaagagccattgttctcgtttccgaagaaaacaaaaaatccgagcccttctcctatcgagaaaaggttcggattttcatggtttggtgcggataagaggacttgaacctccaccgagttgccccgattagaacctgaatctaacgcgtctgccaattccgccatatccgcatattctgttgtgttcctgcaccgcagcgccgggaacgatagttattataccagatacaaaagaaatgtcaaggcttaatttcaaaattattcgacaaatttttgcggtaaagttggtgcactctggatagcggctgtggggcgctttttagggcagattatggtacaataaacgataggcaacaccgcacaattcccgcctgacggcttaagcaccgttccggcggctgcggcacggcatctgcgttgccaaaatgctcgataatacacaaagtattatctgcgcttttggcttagcatctgccgcacctcgcgcgccgtatcggcacttagaattatgcggtactgtctatacgtccgggcatcgcccggcgattacggaaaaacgagggaaaacgatgctgaatgtgattatttttctggtcggtgcactgatcatgttttacatggcgctgcgcagcgtgcgtgcgcggcagcagctgcgcaccaagggcgtctgcgtgcaggccacggtaagcggcacggtgcagagccgggacggcgctgcctatgtgctggagtttaccaccgcaggcggcagccaccggctgcagtaccccaagcccgccaagggcaagtcctttgccgagggcagcgtggtcaccctatactacgatcccgatgcaccggagaagatgttcgtggagggcgacaagtctgtgctgggtgccgagctgctgtacgtcggcatcggtgtggcgctgctggtgctgatggtcggcatcatgaaccgttgagaaggagggacaccgtatgaaactggaacatttcggcatggctgagccgggggactgccggttggtgttcacagccagcgctgaggagctggccgctgcactggcaaaggagcaggctgccccggatgccccgcaggacgaggaagagctgctgacggcagcggtgaaccgcaccattctggagggctttgatcctctttaccggcagctggtgcaggaacagcagattgtaccggtgaccgacccggattttgagctgctggcggtcaacaaggccgagggcttccgggcgggcgcgcagttctacgccctgccgccgctggaactgggacgggataccggctttgtgcaggccatcgagccccacccgctgcgccggttgaccattgagctggagatcaaccgcaattatggtgacgaagagcgcgccgccgatgccgcaggcaaggctgcgctgcgcgaccgggtgacccgggagctctacgcaaagcgctgcgcacaggctaaagacagggcagagaaggagctggtctggcagctgggcgatgaggtgaccggctttgtgcccaagcggctggaagcgggcaactactttgccgagcagcggcagttcaatctgagcctgcaggcaaacggcatcaactttgaccggttcttggcggtacgcgggcagacggtggaacagttccggcagtggctgcaccagcaggcggagcgcaagctgcgcagctggctggggcttttgctggtggctgagagggagggcttgcagcccaccgaagccgaggcgaatgccgcccttgccaactggaacgagaagctggacggggagcgcaccttcccggcgaacgacagccgcaaggtgcgccagcgccttgcccgggcaaatgctgcggcctttgtggtggcgcattccaccctcaccccgccgccggcagagcctatcgtgcaggaaccggagaataaatgataacaaaaaggagagatgcgctgcatctctcctttttgttaatgttatgaggggtgctcaggtctgcacaccctcgaactggctgttgtagagcttggcgtagaagccgccctgtgccagcagctggtcgtgattgccctgctccacgatgtggccgtccttcatgacaaggatgacgtctgcttcccggatggtagaaaggcggtgcgccacaataaagctggtgcgcccctgcatcatgcgggcaaaagccttctggatgcgcacctcggtgcgggtatcaatggaggaggtggcttcgtccaggatcagcatgggcggcaggcagagcattacgcgggcgatgcagagcagctgcttttgtccctgactgatgttgccgccgtcctctgcaatgacggtgtcgtagccctcgggcaggcggcggataaagctgtgggcgtgggcagccttggcggcggcgatcacctcatccatggttgcgtccggcttgccgtaggcgatgttctcccgcaccgtaccggcgcgcagccaagtgtcctgcaataccatgccgtagctgccacgcagggaagcgcgggtcacatcccggatatcggtgccggacaccttgatgctgccgctgttcacatcatagaaacgcatcagcaggttgatgagggtggtcttgccgcagccggtagggcctacgatggcgatgcgctgaccgggctgcacgtccagcgagagcccctcaatgagcgggcggtcgggcaggtagcggaaagaaacatcctgcagctgcacatggccatccggctgcagggcggcggcgttttcagtctccggtacctgatcctcggcgtccagcagttcaaacacccgggcggcgcaggccagtgcgttttgcagctcggtgaccacgccggagatctcgttgaagggcttcgtgtactggttggcgtagctcagaaaaacgctcagctgaccgatggtgatgccgccgcgcacggcgtacagcgcacccacaagacccacgcctgcgtacacgatgttgttcacaaagcgggtggcggggttggtcaggctggagaagaagatggccttcaggctcacgtcctgcaattgtccgttcacttcgtcaaaggcggcaaggctttcggcttcgtggccaaaggcctgcaccaccttctggccttcgatcatctcgttgaccagcgcggtctgtttgccgcgaacggtactctggctctggaagtagccgtaactgcgctttgccagaaagcccgccaccacaaggctcagcggggtgatgcacaccaccaccagcgtgataggcacgttctcccgcagcatgaacagcaacgtgccaaagatggtcaggatgccggagaacagctgagtaaagcccatcagcagaccgtccgcaaaggtgtccacatctgccaccatgcggctgacgatatcgccggaggggtggctgtccagataggacagcggcagggtctgaattttgcgcagcgcctcgttgcgcagatcacggctgaccgagaaggtgatgcggttgttgcacacgctcaaaagccactgcgcaagggcggctacggcagccaccaccagaatgcttacggcaatgcgcagcaccccggcaaggtctacattgcccttgcccagcatcttatcaatggcatcaccgcacaggatggggatatacagctgggcggctacgctgaccgccgccaccagcaggctgcacaccacaaaggcgctgtacggacggatcttgtgcagcacccggttcagggtggccttgcgctgctgcggggtcagcttgttttttgcttttgcactcatgcttctgcctcccctttcttgaactggctctcgtagatctcctcgtacaccgggcagctgctgcgcagggcgctgtgggtgccgatgcccaccagatggccgtcatccagcaccagaatctggtcggcgtgctgcaagctggcggcacgctggctgacgatgaacacggtcagtgccccgggcagcgctgccagcgccttacgcagggcggcgtcggtggcgtagtccagcgcactggcgctgtcgtcaaggatcaaaatgtccggcttgcccaccagcgcacgggcgatggtcaggcgctgcttctgtccgccggaaaggttgcgtccgccctgctccaccggctcgtccagcccaaggggctttgcacgcacaaagtccgctgcctgcgccgtttccagcgccgcccacaggtcggcatcggtggcgtccttgttgccccacaaaaggttggagcggatggtgccgccgaagagctgcgccttctgcatgaccaccgccaccctgccgcgcaaagcgtcccgggggtagctggccaccgggcggccaaagatctccacgctgccctcggtggcatcgtaaaagcgcgggatcaggtttacaaggctggatttgccgctgccggtgccgccgatgacgccgatggtctggccctttttggcggtaaagctgatatcggtcaggctgggtgcgcctgcgccggcgtaggtcagccctacatggtcaaagcgcacggcatcgccggtcttgtctgcgggcacttcgcccagaagttcggcggggaaggtcatgccgggcttcgtgtccagcaccgcctgcacacggcccgcacaggccagcgccttgctgatctgcacgatgaggttggcgagctttaccagctccacaaggatctggttcatgtagttcaccagcgcaatgacatcgccggaggccatgccgcccacgttgatctcgatgctgcccacatacagcagcgccacgatggcaaggttgatgagcacataggtcagcgggttcatcagcgccgaaaggtggccgacgtgcagctgcatcccggtcagcagggcgttggcgtcctcaaagcggtcgatctcgctctgctccttatcaaaggcacgcaccacgcgcacgccggtcaggttctcgcgggtcagaccaagcacccggtccagccgggtctgcacggttttgtacagcggccgggtgatcaccatcacgccgaacaccaccacgctgagcagcgggatggtgaccacaaagatcattgccgcccgggcgttgaccgtaaaggccatgaccatggcacccagcaccacaaaggggctgcgcaggaacaaacgcaaaaacaggttgagcccgctctgcacctgattgacatcgctggtcatgcgggtgataagggtgctggtgcccagcgtatccatctctgaaaagctcaggctctggatatgggcaaacagggcgtgccgcagcgcggtggagtagcccaccgccgccttggcggaaaaatactgcgcggtcaggctgcaggtaaggccgacaaaagccagcagcagcaaaaggccgcaccgcaccagaatataatgcaggtcgtgcgctgcaatgcccacattgacgatatccgccatgaccagcggcacgaacaggtcaaaggtggcttccagcatcttaaagagcggtgcaagcacgctttcgcgcttgtagcccttcaggtagccaagcatccggttcaagaaaattcctcctttgggggtcaaaatacaccttattataacgcgatgtatattgaaaatccagtgccacagctgcgttttgcattgtacaagctgccaaatcctgttatactagaactgatattgatagggaagtatggtgaacacaatggcaagacgaacagacggcggggtacgcttccgcccggtgggcagccgccgcagccgcaccgcaccggtgtacagcccgcgcggcaccggctgcccggccatcgagcaggcagtgcaggggctgtacaagggacagaacgaggaaagcttctggtccctgatgagtgcattgaattacgcgctggaactggagacccatgtgctggtgccgctgcaaacggcgctttcggcgcagggtgcgcctgccccgtggatggagcaccccatcccggcggaaaaggccgatggccttgccttgtggacgctgcgcaacgataaggggcgctgctggctgccgctgttcacctcggtggcagcggccggtgcagaccgcagtaccggcagccgccccatggcagaccgcaccttggagcaggccatgcagctggcgctggacaccccgggcatcgacggcgtggtgctggacccgtggagcaattccgcctcgctggacggtgcgctgctcaacggtctgctgcacgcaggccacaccccggagggccccggcgcagaggaggccgaagccggtaaagaagctgcccgcgccggacactgggcggcagcggcagagtgctaccagaaagccgctgagcagggaaattctgccgggctctcgctgctgggcgagtgcctgtatcaggggcgcggcgtgccaaaaagcgctgcgcaggcacgcaagctgtggaaagctgctgccgaaagcggtgaaaccatcgcccttttgaaccttggcgacgactgcgccgcccggggcgacaacggcaaggcgctgttgtggtaccgccgggcgcggcagagcgcggcagcggtgccggatatcgagtatacgccccgggtctgcctgcggctggcgcagtacgaaacgcgctacacctcccgcaaaaaggcgctggcgctggcggcagaagcaaagcaggcttttaccattttgcagcgagagcacgagccggacgccgactgctggttgcaggaagcggaacagctgctctatgagctgacccacgagccgcctacggctccggcagcatataacatagaatctttacaattggactaaaaaatggtcacagccgtccggtaagatagactggagagaaatcagcccgcagacacggcggacaagaaacagaggaaacagtatgagcaaagtgatcggcattgatctgggtacgaccaattcctgtgtggcggtagtggagggcggcaagcctgtggtcatcaccaatgcagagggcgagcgtaccacccccagcgtggtggcatttaccaaggacggtgagcggctggtgggcggcgcggccaagcgccagatcgccacaaattccgggcgcacgatctccagcatcaagcggtacatgggctcggactaccgggcgcacattgacggcaaggatcttgccccgcaggagatcagtgccatgatccttgccaagatccgcagggacgccgagagctatctgggcgagccggtcaccgaagccgttatcaccgtgcccgcctattttgacgacagccagcgcaaggccacgcaggatgcaggccgcattgcggggctgaacgtgctgcgcatcatcaacgagcctaccgccgccgcggtggcctacggtctggacaacgaagccgcgcagaagatccttgtttacgaccttggcggcggcacctttgatgtgtccatcattgagatcgaggacggcacctttacggtgcttgccaccggcggcgacacccatctgggcggcgatgactttgaccagcgcatcgtggagtacgcggtggcggagttcaaaaagtctgaccgcatcgacctgacccgcgaccccgccgccatgggacggctgaaggaggaagcggaaaaggccaagaaggagctttccagtgcgccctctgctcagctgaacctgccctttatcgcggtgggcaaggacgggccgcaccacttggatatcgccctgtcccgcccgcagttcgagatgatgaccggcgatctgctgtcccgcaccgtgaccccggtgcagaacgccttgcgggatgccggcatctctgccagccagctgggcaaggtgctgctggtaggcggcagcacccggatgcccgccgtggagcggcaggtgcgggagctgctgggcaaggagcccagccacagcctgaacccggacgagtgcgtcgccatgggtgcagcggtgcagggtgcactgctgcagggcggcggcaagctggcgggtgccaccggcgcggcagcgcaggggctggtgctgatggacgtgaccccgctgaccctgtccattgagacgctgggcggcgtggctaccccgctgatcacccgcaacagcatgatccccacccgcaagagccagatctttaccaccgcccgtcctatgcagaccagcgtggagatcaacgttttgcagggtgagcgccactttgcgcgggacaacaagtctttgggcaaattcaagctgaacggcatccgggcaagcttttcgtctaagccccagatcgaggtcacctttgatatcgatgtgaacggcgtggtgaaggtgtcggcgaaagaccttgccaccgggcgggagcagaacatcaccattaccggcagcaccaacctttccgaaaacgagatccagcgcgccatggcagacgccgccgcctacgaggccgaggacagccgccgcaaggagcgcctggagctgcacaatcaggccgaggtgctggcctacaaggtggatgaagcactttccaagtgcaaaaaggaactggataaggacgaaaaggctcgcgtgaaggccgaccttgccaacctgcgccgctgcctgcgcaaggataagcccgaaaagatgaacgagaccgaggaagctgccctgcggcaggccaagagccagctggaaacctcggccaaccacctgatgctgctgtactctgccgagcagacccccggcgatggaacggacagcacgctgtaatatttataaaataaggtttgtgggctgctgcacccgcccggcgcagcagccctttttgcagaaaagaaaggaacggctatgaaggaactgcaatatccggtgcgctccgggcgttaccgccactttaaaggcaacgagtatcaggtgctgggcgtggcacgccacagcgagaccgaggaggaaatggtggtgtaccgcgccctgtacggcgagggcgggctgtgggtgcgccccgccgccatgtggctggaaaccgtgacccgggacggcgttacccagccccgctttacctatatcggggagtgaggcccccggcttgaatcccgttattgaccctaggattattttgcggtaaaatgtgagtatgataccaaacaacaaaggaggttttcgtatgaaggccaaacgatggatctcgctgctgcttgcggtcagcatgatgcttggtatgctggcgatgcccgcctcggcggcagcgcagcagccggaaagcaccgctgttgtcagcgaggaactgtccgatgccgcagcgctgagcgcggcagaggatgaaaatgatatcgtcaacatccgcatccgggcgaccggcaaccttgtctacggctccgattataagctggaggtggagacccggcccgaaaacacccagtatattgccgtggtgctgggcaccagcggcgaagcctacggctatgtgaccctgatgatctcggataagctgcgcacattgctcaagctgatccccctgcccaaaaagatgtcccagaccccggatcaggccgaggaattcaacgtatacagctaccttaagcagctgatcgatggcaacgatgtcggcgtgctgctgcgggtcgcggacgaggtggtgtcggtaatggataccgtcagcttctttgtccccgccagctatctgaccactgtgaagaacgtttccaacggcatgaagctgaccctgagcctgatccgcaagtatctgcccgagggcgcgctgagccgcatctatctggatgagcagcccaaggacagcggcaagtacgttgccggtgctattgcgctggaaagcagcgatatcaacgccgccgggtttgccatgttcaagatcaaacccaagactgaaaacgtcagcttgagctgggcagccgatgctccgtccagcatgaccgtctcccagctgcaaaacgccgatctgaccgccaaggtcatttcggacggacaggtggctgaaaacggcaaggtgaattacacctacaagaaaaagaccttcctgtgcttcagcagcaaaataaacggcgtgcccaccgagcccggcacctacacccagaccgccaaggcagggggcaactactcctgcggcagcatcagccgcaccattacggtgaccgctgacccccagcccgccgcagagcagccggccgaacaagcggcagagcagcctgcagcataaatcagcggaaaactatttttgaataggacgatcccggaaagtctgcggactttccgggatcgtttttttacgggagaagctactttttattatctataaaatgggctgctttactcttgcaaatcgacgcgccatacgctattataaaaataaaagaaccccttgcggtaaaaaaggggacaagaaggagcggtttatctatggaagagaaaaaaagcggcatcaaaaagttccttgaagagttcaaggcatttgccatgcgcggcaatgtgctggacatggcagtgggcgttgtcatcggcggtgccttcaccgccatcgtcaccgcgctggtggaggacatcatcaacccgctgatcggcctgttcttcaaggcagatttttccgatgtggtcattggtctgggcggctccagcatcaagatcggtgagttcgtcaactccatcatcaacttcctcatcgtggcctttgtactgtttgttgtgatcaagtttgtcaactccctgcacaaaaagcccgaggagcccgccgcaccggaggagcccaccaccaaggtgtgcccctactgccagagcgagatctccatcaaggctgtgcgctgcccccactgcacctccaagctggagggctttcccgaaatgaaagcctgaagcattcagcattgataatacaacaaaaccctcccggccgggcgcagtctttgcgcttgcggcagggagggttttgcacattttgcggcttggttgtggaaaagtggagtgggaagtgaggtgggaaaatcaggcgctcttactgcaccttggtcagctcagccagcttgtggtagatctcagtattgtcgtacacgccgccgaacttctcggcaccgacacccatagcgtacacgttgaccatggcaccggtgtgggcgtaggtggtgtggtccataccggacttgtggttgatggtgtggcagacagccatgctgaaggggatgtaggtaccgtacagctcgtagtcctgctggctcatcttgctctggctggaggagcccacctgcagggtgcgctcgtaggccttgcgcaggttctccacctcgtagtcggtcagcagcagcttgcctgcgctggcggcagcggggtcggtgggcagggtcaggccaaagacgttcttcacgtcctgcatggcagtctcaaagggggtcttgttggcgatgtagccctgcacataggtggcatcgaactttgcgtaggacatcttctggtgggtgaggttcgtcaggaaggtatcgtagttggtggtcttgtagccgatggccatgccgccggtctcgtggtcggcggtgacaaggatcagggtctcgttggggtgggcgttgtagaagtccaccgcagcctgcacggcgttgctcatctccagcacatcgtggatggaagcagcggcatcgttggcgtggcaggcccagtcgatcttgccggactcggtcatcataaagaagccctttttgttgttcagcagctcgatgccctttttgacatagtcggtcagctgccactcgccgttggcagcgtccatggcgtagttcatggccttgccatcgcccagattctcggcaatgatcagggtcttgcctgcaccggcggtcagagccgctgcaccggcctgggtagtgaccacgttgtaacctgcgttggcagccacggtatggttgtcggggccggtaccgtcgccgttcaccttctggaactcgccgccggcaaagtactcaaagccggagtttgccagttccacgccgatctcgtagtagttcttgcgggtcttctggtgggcatagaaggcagcgggggtggcgtggtcgatgttcacggtggagatcacgccaaccttatagcctttctgggcgtgcagcttttcagcgatggtctcgtagggcacatcgcgggtccaggggcacatattgatgacgccgctctcggtcttgtggccggtggcgatggaggtggcggtggaagcagaatccgggcagaaggaggtgctgtcgtaggtggtcacgctgcccacctgcgggaagctggtaaagctcaggtcagcctcggtcacagcgccgttgttgtccacggtgcccttgtagaagcgtgcagactggatctgggcagtgcccatgccgtcgccaatgaacaggaaaacgtacttgggctttttgaacacgtccagcaaaccgttctcttcgtctgctgcggcagaagcatccgtctcggcggcgtgcgcagctacgggtgcagccgacagcatacccactgccgatgcaacggcaccggctttcaggaagctgcggcgggaaattttcgcgttattcataacagatatcctctctttttcagcccggcttggggcggttctactatttcttgtgggaacacctgtattgtaacgcaccgcccgcagcggcgaaaccagccccgtgtaacacttaggtaaacctttggcgcacggaagagcggcggtgtaaaatccgggcaaagcaggtaaaatctgcctgtaacgcccgcatccgggtcactttttgcgccgaaccgccccgcaagggttgcaagcagggggcttttcattgtacaatagagagaccaagcggagatacacttctataacgagaggatcttttaaatatgtctgatatcaaagtgctggcgctggatctggatggcaccctgaccaacgaccagaaactcgtcaccccgcgcacccgcaccgcgctggacgccgccattgaaaagggcgtgactatcgtgttggcgtccggccggcctaccgccggcatccagccgctggccgaggagctgggtctggacaaaaagggcggctgcatcctgtcctacaacggcggcaagatcgtggactgccgcaccggcgaaacgctggtggaaaaaacgctggaccctgcccttgtgcccgagctgtgcgcttttgccgccgcgcaagatattgctatcctgacctataaccgcgagggcatcgtctgcgagcgggacaaggacgagtgggcgaacaaggagtgctttaccacaaagctccccatgatccatgtggacgatctggcgtcctatgtgaactaccccgtgtgcaaaatgcttatcacgctggaccccgcccgccgggacgcagtatgcgctgccggacagcagcagtttgcaggccgcgccgacctgtacccctccagccctttctttattgaagcggtgccgcagggtgtagccaaggacggcagtctggcggagcttctgcgccgcatgggcctgacccgcgagaacctgatggcctgcggcgacggcctgaacgaccgctccatgatcgcctacgccggggtgggtgtggccatgcagaacgccgagcagccggtaaaggactgtgccgactatgtgaccaccgccgacaacaaccacgacggcgtggccgaggccgtggagaagtttattttacgagaggactaacaaagcaatgccgcgtaacttggttttatttgatctggaatggaacatcggctaccagccgtatacctttaactaccatggggtgcagcagaccctgcggggcgagatcgtggagatcggcgccgtaaagatcgacgaggatgccaatgtgctggacaccttttccatccatctgcgtccccgcatcttccgcaaattgcagcaccatatcgctaaggtgaccggcctgacgcaggcagatctggacaagggcgagcccatcgtgcagggactgcgccgctttatgcagtggtgcggtccggatgccgagtttgccgagtggggtctggacgatgtgccggtgctcaagcagaacctgttcctgtgcaatctggacgagtccaggcctaccgtgtggtacgacctgcagcaggtctttctgcgggagcatccccgcaaggaaggtgagggcatgacgctggaaagcgtggtcacccgcatgggcatccccatggagcgccccttccacgatgcactttccgacacgctgtacaccgccgatgtctgccgcctgctggatctgcgttccggccttgccgcctaccccaccgaggacgaggcgctgcgccagagtctgtgccagacccccggcgattaccgggactttacggtgttccacggctatgtggagcagtacgcatggcgggctgacccaaagatcagccagatgccctgcccggagtgcggcaccaccctgcagccggacgagctctggctgaaaaagggcagcaacagctggtacaccctgtgccagtgcccccgctgcaccggcagcggcaacgccgccgggcagggcgtgttccagcggtacaagttgtcccgccgggacggtctgcactggagctttgcccgctgcgcccagatgccggacgccgaaagccttgcccgctgggaaaagctgcgcaccgcccagctggagcggatgcgcgccaaggctgaaaagcaggcggcggaaaaataaaagcaggaaaatccccttccgtttcgtagtatagatagcagagcacagaacgtgtcgaaaaatgcacactctgttcacggctctgtcatagagaatggatatactaagcataatgcggcctgtccgggaacgccccggcaccggctgcacagaaagggatcggacacaggatgcaaaccacactgatgggctggatacaccagcttggaacactggaatactgggaagcgctgctggcgggctttgaggggcttggcccccttgtgcccattctgctggccatggtggagtccttttttccgccgctgccgctcatcgccattgtggcgctgaacgtagccgcacacggcggtctgttgggctttttgtacagctgggcaggcgtggcgctgggcggcgtcatcatgtttttgttctggcggcggctcatcaagcgctttttctggaaggtagccagccgctcccccaagctggaaaaggcgcagcagtgggtgaaccgcttcgacacctcgtccctgttcatgttgtcgctgctgcccttcacccccacctccttcatgcactttgccttcgggatgtcggactttgacgaaaagcgctatctgcgcaccgtccttttaggcaaggggctgatggtggccatgatggctgtctttgggcagtcgctggtcagctctctgaaaaatccgttctaccttgtgctctctgttttgctgtggggcgggatgtactgggtaagcaaaaagttctgccgcaagcatcatctggaataaaggatctccctataaaacaaaaaactatctgcaaagcccggagggcggatgcagatagttttttattttggcttaaacgctgccgtgacggcgctgctcggcggcaagctcctgctgcaaagccgccttgcggtgatccagcagcagatccttgttgtacttgaagtaccgctcacagccgttttcggtgaggaactggtgggaagcggggttcaccgtaagctcggtgacgaacaccaccatctcctgactttccgcaaacgcctgctccataaagtcgaaggcagcttccagcgcagcggcggcggtcttttgggtggcctcgcgctggtctgccagcgcacggaactgaccgcgcagcaggtcgaaggcttcctgcgtgccggcggcgttagcgcggcgcagctcgccctcccactggtgcagcgccgcctgcacctgcaggcggttggtcagctctgccctgcccagcagcccggcatcgcgcttttgctgggtctcagtctcgtagtccttgatctgctggctgaacagctctgcggagccgtccgggatatcctccggcagggtagccagcgcctttttggtctcccgcaaaaaggcgtagcaggcatcggccacggcatccgcctgcagggaagcagtaaagcgggtgtccagccctgccagcagcaggctgacaaggctgagccgctcgtcaaagggggcctgcagcagccgtgcgaacacggcgggctttgcctgcccggcaaggatctcctccacgccgtagtcgtcccggtacttgtagtatagatccagataagccgagaagtcctcggcgatcttcgggtgctggatgtactcccggatcagttcctcgtccgcctgcaagcccagtgcctcgtaggtgtccagcaggttggaaagatcttcccagccgcgggcggtgacgaactgggtgccgtccacgtccgcgttgatctggtaaaagttctggggatgcagctccagatagctcaggatggcgctgtggatgtgcgcggcgcgggcgtagtccttccacaccggcaggtcaggctcaatgtccatgcggcgcacacggtcaagggtgacgatgtcaaaatcccggacggacttgttgtactccggcgggttgcctgccgccacgatgacccagcctgcaggcacagcctgattgccaaaggtcttgcactgcaaaaattgcagcatggtaggggccagcgtttcggacacgcagttgatctcatcaatgaacaggatgccctcggaaaggccggtggtctccattttggcatagatgctggcgatgatttcgctcatggtgtactcggtcaccgacacgtccttatcgccgtagtggcgctgccggataaagggcagacccacagcgctttgccgtgtgtggtgggtgatggtgtaggccaccagcgccaccccgcactcccgggctacctgctccatcacctgtgttttgccaatgcccggagggcccatcagcaggatgggacgctgccggatggcgggaatggcgtattcgcccagcgcatccttggcaaggtaggcttttacggtatgttcgatctcttccttggcacgtttgatattcataatattttccccctcttgtcaggagttgttcagctcgcggtacaggtcatcctcctcggccagagcgtccgcaagggcgctggcggggcgggctgccgcaccggtaaattcttcttcgtccagtaccaccttcatcgcccacggcggcacattggcatcatcgaaccgctcccctaaaaacaggaaggcggtatcgtagccgggacgccgcgccgggtaggtgcccatgccgtcggtgaagtacaaaaggccgcgcaggttcgaaaacttcttttcggcgcagagctggtttacatattcaaaggccgggcggaagtccgttccgccgccgccccgcagctcaaagtggttcatggcgtggatgagttcatcctcattgcggatgaggatatcctgccgcacggcgttgtcggcctgaatgaggtgcaggttcatgcggtggaaaaagttctcccgccctttcagcagggtgtaggtctcggccagaaaggcgcgcaccagctcgccggaggtagaatagctggtatcaatgaccagcgccagttcctcgatctttttgctctcccggctttccagcggctcgataaggggcaggttgccgtacaccgaaaggccgtaggtgtagaagttcaaatcaaactcgtccgggtccagcttgacctcctcgcgcaggacgcagaaccggcgcagaaagtccttgtagctgcggcggctgcggttggcggctttgacctgctgcttcagtgcatcggtgccctcgcccgcctccttgtcccgcaggtccagctcggtctgcatccgctcaccgatcttctgccacgttttctgcggcaggggagtgggcatctgctggggctgctccggggcatccttcggccacaggcggtggtcatcggtcacaaattcccgctccagctgccgcagcacgccgggcgtctgccgggtgagccagcggtacaccggggctgccgccaccaccttttcctcggcggtgatctgccggtaggcgttctgccgcacataggtcagcggacgcatcacgcttttgcgctgtaagctgtcgatgacattttccaccgcgatatcgcacgcaaggctccacagctgcggctcccggcggcctttcagccataagtgccggaacacgcagtggaagacggtgtgcagatacaaccggttaagatatttcgggttctcctgatagagttgcaacaggcgctgcggctggtaatacagggtctgtccgtccgtagccagcacccggcagcgctcgtccggggcgggggtcagggcgctgagcgccatatccagaaatcggaagtccagatacagcccgctgcgcaccaccgccagcacttcgccgcccatgcgcgcctgccactcctcgtgggtctccggccgctgggactggaagggcttgcgggggtcgaaaaatttttcctttggcaacgtgtggtcacctctcaaaaatcaaaatcgtaccgctgttttttgggctggggggcatattttttgtgttccgcatctgccagcagggcggcagcggcggcgttctctgccttggcggcaagggcggcggcagacgcaaaggcggctttatccagcacgtccagcgccagcagggcgcggatgccgtcggtatcctgtgcctttaaaaggcgggcgaacacccggtcggtgttggctgccagaaacacccggtagtgcccggcggcggcttcggtcagctgccacgggtaccgcaggcgggcaaagcagagcatggccataacggcggcgtcatcggcatcgtgcccctgcgggaagatggcgtcatattctgcgggaaggaatttattgtcgagaaaacactgccggtaatggtatccctgcccggaaaaggtgtgcagcaggatgtgggcgggggtctcctcgatatcctcccagtaggcagggtaccacagcgccgccagcggtgcggcggcaccggcgggccagaactgcgcctgcacggcctcggtgatgttgttcaccagtgcaaacaggccggtgggctgctccggtgcggcctgcacccgcagggtctccagcgcaaagcagttcaaaaacacatcgctgcccacggtcaggctgctgctacctaccgtgagcagacgcaggctgcggcagttgtaaaaggcgcagctgccgatgacctgcacactgtccggcagagtgacttcctccagaaagctgccgcacaccggatgcagctccggttcgtcctctgccggagcgtcaaggtcaaaatcgtaccggcgggcgggcttttgccccaccgccagcccgaatgcccgggtcagccgcaccgcgccgtccgcgcctaccgcgtagcggcagagggcatccggtgcaggcaggctgcggggcttttcggaaaagcagtagtcgcccagctcggtcaaagcaagactgccgccttccggggcgggcagcgtgcccggcagcgccacacagggcgctgtgccgtacacccgcaccagccgtgccgtctgtgccgaaaggggcaagatatccaatatcagttcgtttgcctgttctaccatgctgcgacctcgttttttgcattgtattcagctttcagtataccgcgaacagggggtgattgtccagtgcgaggggagatttggaatgcccgccgcgtgtgctccaggcatattcagcggaaaacctatttaaaatagagcgattccgggtgggggcgtagagaaaaacagaaaacgccgctgcacggctgtgcagcggcgtttgattcagttgatgaaaaccggagcggaagcgggatcagtccgcgctctcctcttcttcctcgttctcgtcatcctcgtccgtatcacgcggcttatagaagatgccgctcaggaagatgctgacaaagtacagcagcaccatggggagtgccaccatgcactgggacacgatgtccggcggggtgaccacagcagcgatgaagaagatgaccacaatggccacgccgcgcacctgcttgaggatctgcgggttgatgatgcccatcttggaaaggatgatggtgatcagcggcatctcgaacacgcagccaaagatgatgaacatggtcaggcagaggttgacgtagctctcgatactggtggtggtctggatgtactctgcaccttcgatgccggtgctgaggaaccgcagcatgaacggcatcatgagcttataggcaaacagcacgcccacgcagaacaggatcagacccagcagcatgaccagcttgaaaaaggtgctctcgctctttttcaggcccggctttgcaaaggcgtagatgttgtaaaaggccacaggcaccgttaccaccacaccggccagaatggacacccggaaatactgcatcagtttttcctgcggggcaatggacacgaactggtaatagtcgcggcccatggcggtaagcagatcgatcagacggtctgcatacgccagcgagaccactacgcccaccacaaacaccaccgcgcagatgatgagccggttccgcagctctttcagatggccggtcagcgtcatgctgccgtcctctgccatgacttcggctttctttttgcgctttttgtttgtagccacaattactcctcgtcttcgtccttcttatcagccttcttcacggtctcctcggactgctcggcatcctcgtcctccatgcccttcttgaagccattgatggtcttaccgaacatcttgcccagcttcggcaggttcttgggtccgaagatcagcagaacgacaaccagaatgatcagcagctcattagtaccaatacgcataataaatatctcctttttcttgccgcgccgcgtggcgggcgtattacagaatgtatctggcaaccgcgggcgcgggtgcatccataaataagtaggggcgcttacacctttgcttcctcagcaggtgcagcttcggcggcttcctcggcagcggcaggggcttcctgcacaggctcggcaaccggctcagcagcgggctgttccggcttttcagcggggacttccacagcttcagcagggacagtctcggctgcttctgccggggcttcggcgggctgctcgggcagctcctccacggtgtcctcggtcaggtcggtgacctcctcggtctcagcctgcttcttggcggcttcctccttgctggtcttgccaatgccggtaaagctcttggtcacgtcccgcatactgctgtcgatatccttcttgatatcggtcaggggggcaacagcttctttcaggggtgcctggatctcgttcaggggctctaccacgttcttctggatctcttcagaagcagcgccggtgtacttcttcagctcgcggagcatcttgccgatctttttagcatagacaggcagctgatccgggccgatgaacacaaacgccacgatgacgatgacgataagttcccaaaaaccaattttcataagtaacgtttcctttcctgtaccaagggcgtttccaaggccgccgcacaccacagcggtttgtgcctttttgccctttttggcggggattcggcgcactgcgcgcctttgttgccctatgtataccgaaaagtggtgtactgaatgttaatatattattaatattttgtgaatgagtgcgtgaatggcctgttttaatcaacaaaacatattttggtgtcaagttattacgctctggataggatacaacagaggaatacctgcagcctgtgccggaaaaggcaaaagccccgcagggcactgtgcactgcggggcctttgcgcatagggaaggaggtgtaataaagaaaggatagatcagaaatccacatcagtatcgtagtagcagcacttgagcagcttttccatctcttcctgactgggctggcgggggttagagccggtgcaggcgtcagcgatggcgttcttggcgatctcgggcagacgctcgaggaacacattctccggcacaaagccctgctccgtggggtaagagtccgggccgtagtgctggatgcagtgggggatgttcagcgcatcgttcatgccgcgcaggtactcgatgagcaagccgaccttttcgtcatcgtttgcgccgcccagcttcatctcgtccgcgatgacgccgtagcgctttttggcttcggggtccttggcgttgaaggcaatgaccttgggcaggtacatggcgttggcagcgccgtggatgatgtgtgcgccgtagtctgcaaaggcagcgccggtcttgtgtgccatggagtgcacgatgcccagcagcgcgttggagaaggccataccggcaaggcactgggcgttgtgcatggagtcgcgcttggtcatatcgccgttgtagctgtccaccagatcgccctggatcatgcggatggcaaagatggccagaggatcggtgtagtcgcagtgtgcggtggaaacgtaagcctccacggcatgggtcatggcgtccataccggtgtgggcaaccagctttttgggcatggtctcagcaagatccgggtcaacgatggccacatccggggtgatctcgaagtctgcgatggggtacttgatgcccttctggtagtcggtgatgatggagaaggcggtcacctcggtggcagtgccggaggtggaggaaatggcgcagaagtgtgccttgcggcgcagcggcgggatgccgaacaccttgcacatctcctcaaaggtgatctcggggtactcgtacttgatccacatggccttggctgcatcgatgggagagccgccgcccatagcaatgatccagtcgggctcaaacttcagcatggcttcggcaccgcgcatgacggtctccacggaaggatcgggttcgatgccctcgaacagctccacctccatgccggcttccttcaggtattccaccgcacgatccaagaagccgaagcgcttcatggagccgccgccgacacagatcattgcctttttgccggtgaaggacttcagcgcttccaaagcgcccttgccatggtacagatcacggggcaaagtaaaacgagccataatgtaaacctccaaaaatatcacggcacacgcagcgctgtaccgtagtttgttattatgttaattgtataacaatttggagatggctgcaattgacgtaccgggagaaaaagtcgttctattttgggcggaatccacaaacagaaggatgcaacagttggcagcactggaaaaacacaaaaaaacaccccgaagtcctaagacttcagggtgtctgagctggagctgctatccagattcgaactggagacctcatccttaccaaggatgcgctctaccaactgagctatagcagcacatcacagctcgattagtatagcacaggttgacctgctttgcaagcgtttttttgcaaaaaataaaatttttgcgcaaaaagccccggagcatccgcagacgctccggggacttgtgtaaattgcggttactttgccaaactggtcaggatggagtcgcactgctccacggtggaggagagcatcaggttgtaggcggtgaccatctcctgaatggcggtgcggttctccttggtcagggcgtagctctgggtggtgccgttccgcccaacgaatacggcggtgacgctcttggcgttcagccactcgctcagccagctgatctcgtcgtcgctcagctggaacagctccagatcgaaccagcagcccagatcctgatcatagccgccgccgtactcttcatcacaggtgaaggtatacatattatcatcggcagtcacattgaccgtcttgatgtccagcttcttgctgcctgcataggtcaggatcatgttaaaggcaatgccgtcgtcctgcacgaacatatagggatacagcccgcaggatttttttgccatgctggcctgctcctgcggagaggaaagatcccagccgccggtctcctcgtcgtaggtgacggtgaacttggaaaaagcagccttgagctcggcatcactgggggaggcgttggtggtctctgccgcagcgggagcagcgggcagcgcgggcgcagccgccgctgcagccatgccgccgcacagcatggccgcagcgcataaaccggccgcaatacgccggaacaaacgggaagatctcataagtcagttctcctttccattttcgaagggggatttctggtttcagtatatcgcagcccggcggaaaagcaagaaaactgacacgaaacgccctgacgctgtaacgaaacgactttcgcttgcctttagcctacctgatgctcctccagccagcgggtcatctgctgggcgatgcccttgacgctgccctccgcaaagggtaccttcagcccggcggtctgcagcagctcggtgtagctggcaagcccggcgcggcgcaccagcttgaggtagcgctgccatgcgtccttgtggtcgtcaaggctcagcaggaagaactgcagcgctgccatggtggacaggcagtagtcgatatagtagaaagggcactcgtagatgtgcagctggcgctgccacccggcgccgcggccgtagaagggcagattgtcaaaatcgatccacgggcggtacttcttttccagcttgagccactcggcgttgcgctggtcgggggtcaggtcgggattctggtacatgatatgctggaactcgtccacggcgcagccgtaggcaaggaacacaaagctgtcctcggcgtggagcagggcgtacttctcggtatccttgccgaacagcaggtggtgccacggcgcggtgaggaactccatggccatggagtggatctcggcgctttccatggcggggcattccagatcggcaggcacgttggggtcgcgctcggccacatagccctcaaaggcatggccgcactcgtgggtcagcacatccacatcgccggaggtatcgttccagttggcaaagatgaagggagccttgtagctgggcaggctggtcatgtaaccgccggacatcttgccgggacggctttccacatcgaacagctcgttgtcctgcataaagtcgatgaactcggcggtctcggggctcagctcgtggtacatggtgcgggcggcgtccatgcgtgcctgatagcccgggatgggcttggggttgccgtccttgaagatgatgggcaggtcggtgaaggtggggtgagtgatgccggtgcgcttggcgcgcatggccatcaccttttgcagctcgggcacaacgtcccttgccacctgatcccggaaggcctgaatttcagcctgaccgtagccgatgcggttcatgcgcacataggaaagctcgctgtagtccttatagcccagcacctgcgcctgctggttcaggttcttgacgatcttggtgtacaatgcatccagctcgtcccggtgggcgtcaaaataaccggcctcggcctcgtaggcggcgcggcgcacggcggggtttaaatcttctttatagggacccagctgggggatggtcagctgcttgccgtccagctccaccagtgcgccgccgtagatctgctggtactggctgaccagcgcattgaactgctgctgcaattcaacggtgcggtcatccatgcccagcacggcgttcttcataccggctacgcaggtggtgccgaagtgctcggtaagggcatccacataagggtttgccagaaatgcccggctgatctccacactggcgttggtcacggcagggccgttggcatcaaaaaaatcctgctcagccttccagtaggcatcgcgggtgtcgcaggtgtagtggatgttcgccagctgggaggcggtggtgtagtctgcaaaggcgcagctctgctcgtagtacacctgaatgagggcatcaccgtccggggcgtcagcggccttggcggccagctgtttgcaccgtgccagcagggcgtcgatgtcggggcgggtataggtcatttcgctgaatttcatggaaaatttcctttccggggcagttccccctttggtatcttgtgttcatcttaccacgttctgcgccaaaagaaaagaggaagacaggcgggcaaaagtcctatgtttatacaacactgccaaaaataaaaacgctcctttggcaaagatgtctgtttaagcgcttgcggagcggcaaaaaaaggattataatggcatcatcaacagagtaagaccctgcgcgttaagtgccgcatcaacggggagttgtgctgcggacgaaggtattgaccgcggtgcagggtctgcatcccgctgctgcatggacttgggtgcaggcgagagccgtctgcggcttttgcccggaagtgaatgttgttggaattcacgccctcctttgtgcggtctgtcacaggggagggcgttttttgcgtcctgcctgctgttcctttttaaggaggacaactacgatgaacgacaaaaaaacttcggtgcgtaccctgaccatgctggccctgctggtggccatgagcatcgtgttcagccgggtgctgagcatctccaccggcttcgtccggttcaatctgggcagtctgccggtgctgctggcggcggtggtgtttggccccggcgcaggctttgcggtgggcgcagtggccgatatcattggcagtgtgctggcgggttacgccatcaacccgctgatcaccttgggcgcgggtgccatcggtttagtggcgggctttgcatggcagaagctgaaccgcctttccaccaacctgcggttggcagccagcgtgctgctggggcattttgtgggctctatggtcatcacctcgctggcgctgcgcctgttttacggctatccgtgggcaacgctggcggtgcgcatccccaacgccctcatcctgagcgccgtgaacgttgtgctgctgcgcatcctgctggaaaaccgcagcctgatgaagctggcaaagaagtaagaaaactgagaaaaccctctcaggcgggggatgttctcttttggcaccaaaagagaaccagaaaagtgccagcgatttcgacgcgctggagccacgaaaaaggggctgctcgccccttttaaccccaaaggggtgggctacaccggaaaaaactgaagattcacgcctgttcggcgtgaagatcttttaaccgttttttccggctccgccgatttatagcccctcagtcgctgcgcgacagctccccccgggggagcaagcgcgcccgcaaactttccggttaagccagaaactttcccgctatgccaaaggctccctctcagagggagctgtcaaaaccgtcaggttttgactgagggagttcgtttccaaaccccacctgtgaaaaaggggttctgaaaagcccgcaggcttttcagaaccccaaattaaaaatctttttccgctaatgatgcgcagagcgaagcggagcgcattccaaatcgtgatcttgaatcgaggcagtatctatgaactacgaacaggcaatggaatacatccacgcggtgcagtgggcggggcataagcccgggcttacccgcacccgcaccctgctggctgcactgggcgacccgcacaaaaagctgcaattcgtccatgtggcgggcaccaacggcaagggcagcacggcggcaatgctggcttcctgcctgcaggccgccggttaccgggtgggactgtatacctcgcccttcatcaaccggttcaacgagcgcatccagatcaacgggcagcagatcccggacgaggcgctggtggcgctggtggagcaggtaaagcccgccgccgacgccatggaggacgtgcccaccgagttcgagatcatcaccgcactgggaatgctctattttgcgcagcagcagtgcgatatcgtagtgctggaggtgggacttggcggcacgctggattctaccaacgtcatcgaaacgcccgcctgcgcggtgatcaccgcactgggcatggatcacgtcaaggagcttggccctacgctggcggatatcgcagctgccaaggccggcatcatcaagccgggttgcccggtggtgagctacggcggcgcaccggaagcagacgccgtgctgcgccgggtggcggcgcagcagaatgcgccccttaccgaggtggattttgccaagctgcagattaccggcggggatctggacgcagttaccttcagctttgacgggctggatggggtgcgcctgccgctcatcggcagctatcagccccgcaacgccgcgctggccattaccgccctgcgggtgctgcggcagcacggctggaacatcccggaaagcgccatccgcaccgggttggagcaggtgagctggcccgggcgctttgagctgctgcgccacagcccggtctttgtgctggacggcagccacaacgcccacgggatgcgtgccacggtgcagagcctgaaagaccgcttccccgggcagaaattcgtctttctggtcagcatcatggcagacaaggacgtggacgagatgctggcgctgctggcaccgctggccgagcggttcgtgaccgtgacggcgcacaacccccgcgccatgcctgcgcagacactggcagagcatatccgcgcctacggctgcaccgccgaggcagcggacagcatcgaagccggtgtggcgcgtgcggaagaactgggcggcgaaggcccggtatgcgcactgggcacgctgtatttctccggcgatgtccggcaggcgtttgcccgcctgaatgcgtaacgatgcagaaaaaatatttttgaatacaagcagagccggacagcccgcgggctgtccggctctgcatttttataaagaaaatattagatccgcagctgcttttttgccatttgcagcgcacggcgcagcgggcggtagagcagcagcatcagcacaaaattgccaatgccgtgcagtgcatcgtagctcagcccgctgagccaccagctcagggcaaaggcgggcgttttggcaaacagatacaccgccgcgcacagcccgccgaagcacaggccgtacagcccgctgagcaccgcccagaaaaaggcgtagtccatgcggcgcagcagccatgccagcagcgccagcagataccacacatacaggtacatcacccaccacaggccaaagccgtacagcacgccctgcagcaggataaataccgtgatagcgccgggcgtctcccggggcagttccagcgcaaacaggatgatgagcaggcttaccggctccagattgggcagaccgctcatggcctgcttgctcaccaccagcagcgcacccatcaggccgctgagcaccagccgcagcacccgagtgtgcagcgccaccggctttttagcccttggtgtaggtaaaggcatagctgtcaccatcgtggagttcgatgtctgccacgcccaccgtggtcatctcaccggcagcatcggtcaggcaccaccaagcctgatctttattatagtcggcggtctcgccgttcacggtggtcacaaagccggcatcggcttcttcctgactgatgataccggccttggccagtgcggtgctcagcttttcgccgtcggtcacgttcagcagaacgctggatacgctgccgtccgcagtagtaacagtgaactccaccgtggcctgtgcctcggcggcagcggaagaagcaacctcagaagcggccacagaagaagccacggaggaagcggcattggagacagcgctggaagcagtggaggacgcagaagcaccgcagcctgccagcaggcagacggacagcacagcactgagggtcagggcagcaaatttatgcagagtgttcatggttcaagatctccttgtctcgtgttttgtgtgcagagcgcacggcagatatagtaccatgaaaccggctgaaaatcaacgttttttctgcatagcttcaaaatatgcagcggcgacgcctacctgattggcctcactggaaaaggcacagggcacgatctggcagcggggcaaaccctccatgtaagcttgtcccgcccgggaggcgtacagtccattgtaggcgctgcgcaggctttccagcagcaggggctgcttgctgatgccgccgccgatggccaccttttccacatccagcagaacggtcaggttgtagatctgcaccgccaccgcgtggcagaaccgccgcagcacctctaaggcttccggctccccggcgttggcggcggcaaaaaagctgcgtccgtccagcggggcgtcctccggcagtgccttgcgggcgcggtaccatttaagcagattgctggtgctgcactggcaggccatgttctgatccggggcgtcccacgcttcggcgttggtattgacaaagctgtactccccggcggtaaagtgcactccgcgcaccagctgcccgttggcaatgatgccgccgcccacgccggtgccgatgatgaacaccgccgcgttgcagcagtccttcagcgcgccgtttgccagctctgccatggcagcggccttgccgtcgttttccaggataacgggacagccgcacttttccgccagcagctgccccaccggggtggcggtgttgtacagcagcgctccgccgttggaaacatagccggtgcggttatccacaaagcccggcagcgccatggcaatgccgctcacttcatctttgtggggcgcatacagccggtagactgcatccagaaactgcgcctgcgtatcctgcggcgtgggcaccgcgccgctgtccgtgcggtgcatctgctcatccatgaccgagtatttgatctcggttccgcctacatcaaaaaccatgatcttcatcttgtaaccctcccgtaaacggtcgttttctgtccctattatggcaaatcagcgcgggaaagtaaagccctggcagtaaaaatgaaaactgcaaaaatcaccccggcttgcggttgcaatccaccctgccctgtgatatcctgaaaagagagtatctattatataaaggaagaaactgccatggattgcaaactgcgtgccaaaaactgcggcggctgcccactgctggggctggactatgccgcgcagctgaaacagaaggaagaaaaagtgcgtgctcttgtgggcaaatacggcccggtgcaccccatccggggcatggagcagccttgccactaccgcaataaggtgatctccacctttgcccccggctggggcggaaagctgacctccggtatctacgcggcaaacagccataaggtgctgccggtggaaagctgcctgctgcaggacgaagtactggacaagaccatgcaggcggtgcgggctgccgccaacgcctgccgctaccagccctacgacgaggacaagggcaccgggcttgtgcgccactgcctgctgcggcggggcgtagccaccgggcaggtgatggtggtgctggtaacggcgcagccggtgctgccgggcgcaaagaactttgtcaaggcgctgctggcggaaaccgcgcagcgcggcgtgactgtgactaccgtggtgcagaacgtgaacagccgcaagaccagcgtggtgctgggcgaagcggaaaaggtgctatacggcaaggggttcattctggacaccctttgcggcaagacctacgccatcagcccgcgcagcttttatcaggtgaacccggcgcagaccgccgtattgtacggccttgctgtggaagccgcaaaactgaccggcaaagaggtggtgctggacgcctactgcggcatcggcaccatcggactgaccgccgccgaccatgcaaagcaggtggtgggcgtggaactgaaccgggacgctgtgcaggatgccattggcaacgcaaagcataacggcgtaaagaacgcccgcttctttgccgccgatgccacccgctggatcagtgaagccgccgcagcaggggagaaggcagacgtgatctttatggaccccccgcgcgagggctccaccccggaatttcttgccagcgtggcgcgtatggcacccaagcgtgtggtctatgtcagctgcaaccccgtcacccttgcccgcgaccttgccaccctgacaaagctgggctataaggccgagggctttaccccggtggatatgttcccgcatacggagcatgtggagacggtgtgtttattgtccaaacttaatgcaaagcaacatatcgaggtagacatccacatggacgaacttgatctcaccgatgcagagaagaaagccacctattcggaaatcaaggaatatgtgctggagcataccggactcaaggtcagcagcttgtatatcgctcaggtgaagcagaaatgcggtatcatcgagcgagaaaattacaacaaaccgaagtccgatgatgcaaaacagccccaatgcccgcccgataaggaaaaagcaatcaaggaggcgctcaagcacttcggcatgatctaaggagggcaaaatgaagcgtttactttcttgtgagttcaatatggatactgcctgtgtggagctgaaatttgcaaatggcagcatgattgccattgatacgattgcggtagagaatgaggttgccgataatatatatcagcggtcagagctggactggctgatttacaacgatccggcagcctatgcagatttagttctcaacggcgacccggaaacatacctgaaaactgttacagaatataaacctttggactgattaccagagataaagcaagccgcctgtgcgggcatatcaaatgctcatacaggcggcttttcctttttgtactgtgactttatcagttctccgaaatggaccgcttaaacaatatccatgtacttatgaagtagcatatcagcagtaagaaaagaataccaatgataatccctacttgtaccatcaaggctccgcagccaatataagctgagatttcagcagaaacactttgaagaaaatagccaatcacaataattgctacaacgattgccgctgtgatcggcatcccaaaccaaacaccaagctgttttagaaccaaagtatgcaggtccttctcttccactcccatttttcgcagaaccgaaaatctgtagttgtttttttctgcatccaggagctgctgaagagccagcacggtaagacacatcaccatcagcacaattgcaccatagatcaaggacgcttttaggataaagttaagggcgattatacggttcacttccgtagtatggacagttgtactgtatcctgccagattgtctttatcaggatcttctggataagaacgcccaagaagctgttccagcatttctgccgttttgaagggaagcggatattgggtcatcacaaatcggttgcgctgtaccggaagcaagacttgcgctatttcgtcaggtatgatatacaccacatctgtataaagattatagatggattcccccacaggctcctgaaacacggcgttctcactgagtttcagggtgcctgcgtcagtttccagtaaggtatgctcagcgatgtagttttcaatatccttgtcctctgccgcacgatgccagtgggtagcaaattcatccgtttgtaagataataggttcatatcccaacattttccgaacagcgttataatccttcagtgcaatcgccaagggaggaaaatcgtactttacccgctggtaaaagtcgcttttttggggaagatattccgaaaaagtcaaatcgtcctttatcgctatgttgttttgttctatgaacgcagtaatttccccatagtctgtatccggaagattttccacttcataaacttcgttgtagcggcttgaaatttgaatatcatagactgcccgactatccaaatagcccagactccatcctgtcaaaaccggcgcaatgacaaacaagcagatagaaaaagtcagggtcacacaaatgatcgtcatcgttttcgtattggtagccagcttagaggaaagctgtccaaacagaaataaactcgtattgtgatatttgcgggacactttagattccttccagtataggagcgccgcatttgataaatacatgactgcggaaatgataaacaaaatatccgcaaccccaaacagcaaatattgattcagagttggggcatcaaatccaaggaagtaggctttttccagttctgcgatggaaaaaatcgggatagcggtcaatactgcaccagccagaagcccgcaaaggtatcgggaaaatcctatttttctgtgtaaaacagcacctgcgattgcccaaagcagcgtcagtgcagggaaaaggacattcccccaatacatgagctttacaggaagcggatgtctgggatcgaagtaaaaatgatattttacagcacctacctccagcatccacagcagcataatgccatagataatacagatcatcggcatccatctgcttttatgaagcggtttttcattctgacggtttgccgtcataagctcaataatcctgcttttgttgagaattctgacattcccgactccaaccagaatctggcaaataacaaagaagcccacggtcagcagcacagtatctggaaaaaaagaccaagaaaaagcgtagggttccccaaaagaagcaagcagcatagccgtaatgacctgagaaacgatcatccccagaaggattcccaccgacacagagaatatgagcaggaaaaaagtctctccaaaaaagagcagccctatggttttttgctccattcccagggttgcctcaactgcaaactccgattgtttttttctcagcatgaaacgatttacatagtggatcaggaacaacaaaagcagactaatcccgcaaattgccagtttcatacctccagccagcagggaaatattatattccgcaccaatggtcggatgataatgggtgctgctgatagacaaaaacgcatagaacagggtgacacagagtgtcatggtcacaatataaatcaaatagtccttcacagaccgctttgcatttttgaaaatgagtttagcgtacatcgctcatgccccctcccatcatggtgaggacatccaggattttttcaaagaaagtcctgcgggaatcaccacccttacggatttccgtaaagatcgccccgtccctcataaagagaatacgattggcatagcttgccgagaaagcatcgtgtgtcaccatcagaatcgtggctccgagatcttcattgatactctggatcgtcgagagcagcatctgggacgagtgactgtctaacgcaccggtgggttcatccgccaaaatcagcttaggctgattgataatggctctggcacaggcgcaccgctgcttctggccgccggacacctgataggggtatttgtccagaatatccgtgatattcagctttccggccatttcccgcacccgcccatcaatctcgcctgctggaaccttgttgatggtcagcgccagggctatgttttccgaaatggtcagcgtgtccagcaggttaaaatcctgaaatacaaatccaagattctcccgacgaaaccgggcaatctgtttttcgttgatttccgtcacatcggttccgtccagatagatatgtcctgcactgacggtatcaatggtggaaatacagttgagcagggtagtcttgccggagccagatgctcccatgattcctacaaattctccctcttgaacggaaaagctgatgtcctgaattgcttttgtaacatttccgccatttccgtaatatttttggatatgatccagtttcaaaatttctttcattgttatcacctctgatctctattgtaaaataagagtggcttcgtttgtatcaagttttcttacaaagttctaacaaaaatgtaagaagtgcagaacgcttttcagttctgcacttcatgaatcagacagttaatgtgaaaagaaagggaaatggctgtgccatgttccgacgactccgccgtaatgccaatgcccagcttttcacagagccgtttgcacagatacagaccaatgcccgtggactgctgaatcagacgaccattctgaccggtaaatcccttttcaaagatacggggcagatcggacgcagcaatcccgattccattgtcctccacgacaaggacaacctgatcctgccatttatgagtagaaatgcggagaaccggctgcttcgtacgatacttgaccgcattgacaatcagttgatttaggataaaacgcacccacttttcatctgaataaaccgtatcctgcatttcctccacttccaggcgcataccactttggagcagcagatatttgttatctgcaatcgcctgatgcaccacttgggacagtgccatttcccggacagaataatctttctctgtatgctcactgcgggcataataaagagcctgttccgtaaagcggttggtcttttccagttccagcagaagttcttttgtccagttcgtccgatggttttcacataggagtttcatggcagtaatgggcgttttgatttcgtgaatccattgttcaatgtattccttgtactccaggcgttcccgctcgacctccccaatctgctccaacatggattttccagccattttcaaaatctgatagtaaacctgatcctcggcctgttccggcagttccatcacttcagaaataaggtatctctcggagagctgcttcgccatatccagaagttttttcatctgccgctttcgtttccagtaagtgaggacaagtcccatcagcaaaatcaatgcccatacgatcaggatcaatactactgcggaagccgaattgccgcacaccagcaaaaatacagtgagcgcagccatgcaaacaaggttcgtcagcagaaatggaagcctgtttttccaataccgtttgctgttcatatcgtgtacccctggcgatgctttgtcttgataaaatccgtcaggccaatgcccgccagtttttcccggatgcggttgatattgacgctcaaagcattgtcatccacatatagctgattgtcccatagataatctacaatatcattacgggaacaaatctttcctgcgtgtttgaaaagataatataatattttcaattcattctttgtcagttctgcttggttaccgtcatattcaatcgtgctactttctaagtgaagaatcgctccttgccaattcagacgctcaatttgttctatcgggtaagctcgtttcatcaaggatgaaatctttgccagcagaattgctgtgttataaggcttggtgataaaagcatctccacccagcaaaatactgttcaattcatccatgtccgtattgcagcttgttacaaagataatcggtacattggaaaaactgcggatttgagaacagattgagtagccgctttcttgtggcagctttatgtccagcaaaatcaaatagggatgagtatttttgaccgcttgcataactgatgtaaagtcagtaactgcggatgcctcatatccgtttccgtttaacagaacttgtaattcagtttgaatgattgggtcatcttcgatgatgagtattttatatttttccatgattacatgtccctttctttgaatatttagtaccaccaaggcagttccagccagaagttatccagagccaatttctccgtggactttgctctgctctctgacagatggaagtgcttcgccgtttcgctcagaggatggaggacatcgtcctcaaagccaaagcgataccagagataggctttctctcgctcatcaatcatttccagagccgtatggatttcttcgtgggtttcctttgcaatgaaaatctgctctgggttctgtactctggaatctgctataaattcatgttgtcccttattctcgccctttttgacctcatccagacgaatgatacagtccagatttttggcttcaaaggtaggattcagcctgcggatgtagtccagcatggcattatgaatagccggggcagcataggtcaaaaacttgttcccgtagtcgggttgaaagctgcttatgcagcccagaagccccaatgaaccctcctgcaccaaatcgttcagttcaatgccgagggcaacgttcagctcccgctgtgcgctccatatctcatatgccgtctttcggataaaccgcagattgttctctacaagggcgttttctgcccatttgtcaccgctctgcgccgcaatacagagctgctcgttagttatcttgtccatcatcttccggcagcaccatcgtctgcatcagccccagcaaggctttgttaaagttgtccagagcttcctgattgactccatcgacaccggaaatgctgcctgtaatagcatcaacaactgcttccggcgtgatggtcggattctgcatatcctgccccttggtcagctcggcaaacatcttttcggtggcttccttgctgattgccttggctgcgaccaaatcgctgcctgcttctttcttgatttccttaaccaccgtcataaaggtgttttgaatcgtggtctggtctgcctgataagcgggaattttcatggcattagcggttcgggctgcctgtactgcttcgggagcttggttctgtcccaacagcagagagccaacggtagcaaacatctggttttgtgcggcatatcctcttgcaagggtatcatccatatactgtgcaatcatataagtaaccatggcaaagcggggattttccagcagacggttgactacatcattgttgacctttccggtataaagattctttgcagcttcaacagataatcccagttctgaaatatcgtagttctttttatccgggattacggtcgtacccaagataaagtccgtggacacattgaacactctggcgatgcggataacgctttcttcgctcagcttttcggtctttccgctaaggaagcggctgatggtgctttcattcacatcaatccgaagtgccagttctcgctgggtcatcttgcgttctctcattacatcaacgattcttttccgaacatcggcgggtaaataagtatcagccattatgcttcctcccctctgtctgttttctgtttgatatattttccgcttttaatgcgggcatctgtcggcttttcagcgtcctccgggatgatccagcggcttcctgcccgctgtgcgcccggtatgcggtcattgttgcagaggataccaactcttcggggagagataccccatttctcggcaacttcaaatgtagacaggtatttcatttctgtatcatccctcctgattcatattaacttcaattatattctatttacggaacaatatcaaccaactttgtgtgaacactgccgtctcgaaacttgcattttttcaagttttcggggcggctttttgctttgcttgcggaagtgcctgatttttcggttgaaagcgtttttctgcgtatattcaggcagatgaaaaaatcatcgagaaaaatcaaggaggttatgcaaatgaacatttttgaaacagtcaaggcggcggtcacggttaggcaagccgccgaacactacgggctgaaaatcaatcgctccgggatgatttgctgccctttccacgatgacagacaccccagcttgaagctgaacgaggattacttctattgcttcggctgcggtgccaagggagatgtgattgactttgtggcaaggctgcttgacctgtctgcctatgaagcagcgcagagactggctgcggatttcggactggacaggccgccgtccgtggtggcacaggtaaagaagtaccgtccccgtgtgaatcagtcgaaacaggacgagcttttctgcatgaatgtgctgtccgggtatcttcatcttttggaggactggaaagagcgatatgctcccgaagcaccggaggacgagccggatgagaggttcgtggaagcttgccacaagctggaatatgtggagtatctgaacgatttgctccttatgagcgatcaggaagaaaggactgataccgtcaaggaacttttgacagacggaacgattgcaagaatgcaaacacgactggacgagcagaaaaaggaggtgcgctgccatgtcagagaacaggaaattgcttgagatgaatgtgccgatgtggtttgacggcaagagtatcaatgaagctctgttttgtgaagattttctgagaacccgtcagattatctttgcaaacggagcttttttcacacctgatggtcgagtgacggacgacctgccgcttcgtggcgaaatctttgaagaattgaaatattgtgccgtgaacaacattccccgcaaaatcagcaacatcattgagattatgaagctggcggctcatgtggaggacttcccgccggagcaggacaggattcatctggcaaacggtacgctcatgctggacggcacttttacagaggggaagccggatattgtgagaaacaggctcccggttttctatcgcccggatactccgaaacctgtgctgtggctttcctttctgaatggtctgctttacccggaggacatccctaccttgcaggaatttatcggctattgcctgattccctccaataaaggacagaggatgatggtcattaagggcaatggcggcgagggtaaatcccaaatcggtgcggtgctggggcaaatgctgggcagttccatgaaggacggaagcattggtaaaatctctgagaaccgatttgcccgtgccgatctggagcatatcctcctatgcgtggatgatgatatgcgaatggaagccttgcgccagaccaattatgtgaaatccattgtgacagctcaagggaaaatggatttggagcgcaagggcaaacagagctatcagggctggatgttcgcccgtctgctggctttctccaatggagatttacaggcattgtatgaccgaagtgacggtttctaccgcagacagcttgtgctgaccacaaaggaaaagcctgccggaagaatggatgaccctgacctcgcccagaagatgaaagctgaggtggagggcattttcctctgggcgtttgagggattgcagcgtctggttgccaacaatttcaaattcacggaaagtgagcgcaccaaaaccaaccgagagtccgtcaagcgtgacaacaacaatattttcgacttcatggagtctgagggctatatccggctgaaagcggatgcttccatcagctccaaggagctgtacgaaatttatcggatgtggtgtgaggaaaattctctgccgcccctgaaatcccgcagctttagtgacagtgtggtggcaaatttaagtcgctacaatctggaacacaccaacaaaatcacaaactctgccgggcgcagggtgtggggattcatgggaattgaagccgtagcccgtccgaatataaatgggttttacgacgtttcgccgtgtacgtacgtaccggaggaatggcgggattgattttttggtacgtacgtacacagcgtacgagcgtaaatcactcctgtataaaaccttcgtgacgtacccaaatgacaggaaaaagtcagtcttttttctgtcaacggacggggcggtttcgcaaaacagcagccgtccgtgccggacattggaaagaggagcagacaactttctgatgttcggcagaggtcgccgcagcgaccgcattaccctcggagagcccctcgggagagcccacggcactttgcagccagtatggatgaaagtgtcatagtgggttattacacttccgcagaagtgcctctccaaagctacctgtctgcaaatcccaaagaaaggaaggaaaaatatggcaagaaatgacggagttgaccgtacctgtgcaagaaatatggatgtcacagataatgacatcggagatgcacaggcacacaatgagcgtgaaaaagaaatatacagtaacgaagatattatcccggaaagaagttccctcaacgtacacttcaaagaacctaccgggagctacgctgaaatgtttgagcagatgaaagctgacaacatcatttccaccagaggtctgaaggcggatgccgtccatttcaacgaaatggtctttgatgtgaactctgcgtacttcgacaatcacggcggttatgaatacgccagacagttttatgaggaagcctataaatccgctgtggagattgttggcggtgaacagtatatcctctcggcagtcatgcacgctgacgagattaaccgggcgatgtccgaagcacttggcaaggacgtgttccattatcatcttcatgtggtctatgtccctgtggtggagaaacagattttgtggtcgaaacgctgcaaggatgaagctctcagaggaacggtaaaggaaaccattatgcaggtcagccgcagtaaaaagtggctgtccaaacctgctgtggacaaagatggaaaaccaattctgcaagtcaatggtaagcctgttctccgaaaatcctattctgttttacaggatgatttttttcagcacatgagagctgccggatataccgatgtggaacgtggagagcgtgacagcaccgaggaacatctgactgtgacccagtttaaggtggcaaaggaaaagcagcgactggaagctgtgacggcggaactgaaccagaaagaagcacagcttgacgatactacacaggctgcggagaagaaaaagcaggagcttaaatccctgcaagcacagactaaggcggcaaccggaatagcggtgacggttcaggagctggagtcgatgggtaagaaatcttttaccgggaacatcgtcttgacacccgatgaatgccgtactctcaaaaattatgctgtcagcagctttgctgaaaaagcggagaaattaaaataccagcagaaatatgaaacagccaagaaagatgctggggtatggaaaaaacgatatgagaaacttctggaacaggctcagccgtatctggatgctgtcaagctcgcacctgaaagggtacgggcttttcttaatgccgttttgaccagaggaaaagagaaacaggacattccgcaggaacgtggacgaaaaagaaaggagagcactattgacagataaatggaatggttttgccgatttacttgcaaatttaatagaaaaatatgcggcggttctggatattgataatcttccagagccgccgtcttgtttggaggaagaaaacacatctgaagaacccagtgacactattgaattgatggaaaagcaatgatataatagtcgtggaataagtgtccaaactctatgcgagagctactgttctcaacgcatagagctacatagaataaaagcgcaataccccgttgcacaattagaaatgaggtgttccggtgaacaattatgatgatatgaatcaaaaatccaatatgattatttacacaacagaagatggattgacaaaaattgaaaccacatttgatgaggataccgtgtggttatccattgaccagatggcagagttgttccagagagataaatctactatttcaagacatataaaaaatgtattttccgaaggcgagctgcagcgagagtcagttgttgcaaattttgcaacaactgcggcagatggaaaaacctatcaggttgactactataatcttgatgttatcatttctgtcggctatcgtgtaaaatccaagcgtggcacacagttcagaatctgggcaactaacattctcaaagaatacatgaaaaaaggttttgctttggatgatgaacgattgaaaaatctgggcggcggtggatatttcaaggaactgcttgaaagaatcagagacatccgtgcatcggaaaaggtgttttatcgtcaggtgcttgaaatctatgccaccagcattgactacgacccgaaagcggaaatctctatccgttttttcaaaaaggttcagaataaaattcattatgccattcacggacagactgcggcagaagtgatttatacaagagcggatgcggaaaaagagttcatgggacttaccacctttgccggtaatcagccgacactcaaagaagcgattgttgcgaaaaactatctgaatgagaaagagcttcgtgctatgggacaacttgtatccgggtatctggattttgcggaacgtcaggcagagcgtgaacaggcaatgacgatgcaggactgggcagagcatctggatcgcattcttaccatgagtggagagcagcttttaattggaaatggaagcattactcataagcaggctgttgataaagcgactggagaatatcgaaaatataagacaagaacgctcagcgacgtggaaaatgattatttaaattcgataaagatgttggaacagaaaactgacggcaaaaaataacagacgatgaaagctgaattatgccacaggctgtggcacaaatgaggatggcgatatgaaagaaaaaacaaaagtatatatttatacgagagtatctactgccgttcaggtagacggttactccttggatgctcagaaatcaagaatgaaagcctatgctgagttcaacgattttgaaatcgtcggtgaatatgaggatgccggtaaatcgggaaagtccattgagggcagattggaatttaaccgcatgatggaggatatcaagtccggtaaagatggcgtgtcctatgtgctggtgttcaagttatcacgttttggcagaaatgcggcagatgtgctgtctaccttacaggtgatgcaagatttcgatgtcaatctgatttgtgtggaggatggcattgattcttccaaagatgccggtaagctgatgatttccgtgctttctgcggttgccgagattgagcgtgagaatatccgtgttcagacgatggaaggcagaatccagaaagctcgtgagggtaaatggaacggtggttttgctccctacggatacaaattggaaaaaggtatgctgtatatcaacgaggaagaagccgaggcaatccgcattatctttgaccagtatgtgcataccgatataggagctaacggacttgcgaaataccttgccaatcacggtatcaacaaaattcagcggcagaatggaaaaaatcctctgtttgatgcagccctgattcgcagaattttgaaaaatcccgtttactgtggtaaaattgcttacggcaggagaagaacagaaaaggtacatggaactcgcaatgattaccgacttgtggagcaggaaaattatctgttagttgacggtctgcatgaagccattgtatcagaaggactctggcatgaagcccaagtaaaacttcttgctcaggcgaagaagtatgaaaaggtcaacaacggtaaagacaacaaggtacacctgctgaccggattacttaaatgtcctatttgcggagccggaatgtacggcaacaaaagcatcaagcacaagccggacggcacgaaatataaggatttcttctattatggctgcaaacaccgcactatgacccgtggtcataagtgtgaatacaagaagcaaatcaatgaggaattgctggacggtgctgttgcagaggttattatcaaactggtcagcaatccgaagtttgcggcgatgatgcagcaaaaaatcaatatgaagatagatacatccgccattgaacaggagattgccaattatgaaaaacagcttcgtcagagctatgctacgaagtcccgtttgattgatgagattgatacccttgacccagatgataagcactacatcaagcgtaaagcagaccttgatgatcgcctttataaaatgtatgataagatagaggatacggagaatctgttgattgaagccagagcaaagaaaatggcaatagaagcagaaaaactcactgctgacaatatctacaaagtgctgatttattttgaaaagctgtacgctgtcatggacgagcaggagaagcgacagattatggaatcgctgatttctgaaatccatatctatgaggaacgacagccaaacggtcagtggctcaaatccatcaaattcaagcttccgattattgaggaagatatggaaatgagtttggacagtgatacacatgtcgagacggtagttcttttgtcccacaaaaaagccgacagttatatccacattgatgtggagtttggagagggcgagggcaagattccggtagatagtattgctaaaagagccgaagcgtacaagcccaaagaaaaagtgacctacaaaatgattaaggagtacatagaagcgaaatacggcttcaaggtacataccgcatatatcgcagaggtaaagcgaaatttgggattgccgatgtatgatgctcctaacgcagtagaggaattgaaacagccgaggaagcatccgacaccagaaaaggtagaagcaatcaaagatgcacttcgttattttgcagtgatataaaactttacttacaatcgaatatttcttacatagccgtttattcatttatttgagtaagcggcttttttcatccctatttttcggaatagggatatttttgtagaaggaggaggtttatttgaacacacaaatcatcgccatcgccaaccagaaaggcggtgtgggcaagacaacgacctgcgcgaacttaggtgtgggactggcacaggccggaaagaaagtcctgctgatcgacggagacccacagggaagtctgacgatcagcttgggaaatccgcaaccggacaagctgccatttacactgtcggatgcaatgggcaaaattctgatggatcagcctatacgccccggagaaggtattctgcatcatgcagaaggcgttgacctgatgcctgcggatattcagctttccggtatggaggtttctctggtaaacgccatgagccgtgaaacggttttacggcaatatctggacacactgaagggacaatattcccatatcctgattgactgtcagccctcgttggggatgcttacggtcaatgcgctggcggctgcgaacaggatcataattcccgttcaggcagagtatctgcccgccaaaggactggaacagcttttatctacggtcagcaaggtaaaacggcagatcaatccaaagctccagattgacggtatactgctgacgatggtggataaccgcaccaactttgccaaagagattgctgctttgctgcgggacacctatggaagtaaaatcaaagtctttggaacggagattccacactctgtccgtgcaaaggaaattagcgcagagggaaaaagcattttcgtccatgaccctggcggtaaggtggcagaggggtatcgaaatctgacgaaggaggtgttgaaacttgaaaagcagcgcgaaaaaagtagaactggcatcggtagatgatctgttttctacggaggagagccgtgccgatgctcagagagaaaaagtagtagaaatcccgctgtcggaactgcacccgttcaaagggcatccattcaaagtcaaggatgacgaagccatgatggagaccgcagacagtatcaagcagtatggcgttctggttccggcgattgctcgaccggacccggagggcggttatgagctggtagccggacacaggcggcacagagccagtgagctggcagaaaaggagaccatgccggtcattgttcgggatttggatgatgatgccgccacgatcattatggttgacagcaacctgcaacgagaaagtctgctccccagtgaaagagcatttgcctacaagatgaagctggatgccatgaaacatcagggagagcgagttgatttaacttcgtcccaagttgggacgaagttgagagccgatgaaatattggctcagcaggctggttcaagcagaaatcaagttcagcgctatatccgtctgacagagctgattcctgaattgatggatatggtggatgaaaagaagattgccctgaaccctgcctatgagctgtcctttctcaaaaaggaggaacaggtagacctgttggacgcgatggacagcgaacaggctaccccttctctttctcaagctcagcggctcaaaaaatacagtcaggaggggcatctgaccctcgatatgatgcgtgtcatcatgggtgaggaaaagaaaagcgatctggaccgagtgacatttacctctgacaccttgcgaaagtatttccctaaaagctatacgccccagcggatgcaggaaaccatcatcaagctgctggaggcatggcagaaaaagcgtcagagagatcaggaacgatgaaaggagccgcctatgagggatatttcagcccgcgagctgaaaggacacaacattctcgccgtagagaggttttgggataacacccgctggatgattgagttttccgtcctgcgtcccagcacagcttacggcagccccggagaggaaatgcggctgtttttgaccgaggacgggtatcaggctgccctgcaaagccagcagcgccgggagattaagatcaagcgttgcgctcgtgtgattgagggacatatcctcgatttcaaaccgggaaaacgccgccgctcataaacccatacaacgaaaggaaaggaatgactatgtgtacggtaaaggaaattcaagaagcaatccgggaagattgcaaatctcagcatgacatggattcaacggatattgaccgagtgatgcaaacacttcctttcgcccaggaggagccatttacagaggcgcgtcctcgaaagccgctgttttggttctatgcaagaaaatttgaaaagtgttgaacaccgcaattctttgaaatgaggattgcggtttttttgtacccaaaattcggaaggagtgaggtcgatggccgtttttcgtattgaacggacccgtgattataccgtgatgagcaatcatcatttacgaaatgcaaacctgtcgttaaaagccaaggggctgctttccatgatgctgtctttgccagaggactggaattacaccacccgtggtcttgcaaagatctgtaaggagggcgtggatgccataggcgctgcgttgcgggaattggaggctgccggttacattgtgcggcacaagctgcgtgaccggcagggacgcatcagcgatacagagtatgtcatatacgagcagccacagcttagaaaaccggatacggattcaccagatacggaaaacccgtatatggataaaccggatacggaaaagcccgcagaattaaatatagagaaatcaaatacagaaaaatcaattacttatggatcaagtaccgattccattcccttccgggaaacagcggcggcaagaccgccggaacggaaaggaagagatgcgatgtctgtcacagagatagaaaattatcgggaattgattttggagaatatcgagtatgactgtctgaagcagcgttatcctctctacctggatgacctgaatgagatcgtagagctgttggtagaaacggtctgtgccagacgaaagaccacccggatctctggggcagactttcctcacgagatcgtgcgttcccgttttttgaaactggacagctcccacatcgagtttgtcatggactgtctgcaaaagaacaccacccaggtacgcaacatgaagcagtacctgcttgcggtgctgttcaatgcgcctaccaccatgaataatcacttcacttcattggtcaaccacgatatgcacgcaggcggctggtaaaggccgccttttatcatgccaaaggaggcacgacatgaaccagatggaaattttcaaaaacccggagtttggcagtatccgggtcatcgaagaaaacggcaaatacctgttctgcggaacggatgtggccgctgcgctggggtacagcaattcccgcgatgcaattatccgccattgtaggtatgtcgtgaaacgcgacgcacctcacccacaaagccccgaccgcaaaatcagtatgacttttatccccgaaggagatttgtaccgcctgattgttcacagcaaattgccatcggcagaacagtttgaacagtgggtattcgatgaggttctgcctaccattcgcaagcacggggcctatctcacaagagagaagctttgggaggtagctacttccccggaggctctgatgaagctctgttcagacttgttggctgagcgtgaagcaaatatttctctgcgtaaggaaaatgcacagctggagggcaaagccgctttctatgacctgttcatcgacttaaagcacagcaccaatctcaggacaaccgccaaagagttggatgtcccggagcgccggtttgttcggtttctgatagaacgacggtttgtgtaccgcacagcatccggcaatgtgctgccctatgccaatgtgaaaaatacggggctgttctgtgtgaaagactactgcaatcacgggcataccggctcctacacgctggttacgccaaagggaaagctctactttgctcagctgcgggagatgatcttgctggtctcataagaacggaaaggaagtgggttttatgcaggaaggcaaaacaatcgggcagctgatggaggaaatgcgccagaaagccggggcgcagaactatcacggtcatgactacatggatctccagcgatttgcggagaacacccggcacatgattatttttgatgtactgacgcatgactccccggttggctggaaaggagaacgcacccgcctgtttttgtcagatataggctatgaaaaagctctggacagtcaggcaaatgggcagatcaagattctcagccatgcaaaggtcagaaatggagatttgttttatgaccacaaagaacagatacgataggaggaatccgatatgaatgaggaaaagaaagtaccctttaagtgggaatatggggaagaaaccatatcgctgcaacttggaatgtatgcgaataatcagcggctttatatcggcatgattacccatacagaagatggagcagaggcgtttgcagatatgacggtgaacctaccaggatattccctggaccccggagaggcgtttatttccggtgacatcagcaaggatttgctgcgattcatcaaagagaacaagttggggaaggtgcttccctatcaggtgcagtccggttatggaaaatattctgccgttgcctttgatctggagaagttgaaggcatttgaccccaaaggtgtggcagagtttcgggaagagtggaatctgccggataagaagccggtaaagaaaaagaaccgcgggatggagcgatgaagaaatattttctccggcggctggtggtcccgccttagaaagaagtgcaccacccctgcacattttgtggaaaggaggcgatgaaaatgcaggaagaagtggaaaacaggactttaacactggttgtcagtggaacaaagttcaccggcaggctgctcaaagccgccatcagcaagtacatggcccactgcaaggaaaagaagctgcaaaagcagagaagccgtgacgctcctgtgacaccccacggcaaacagaccgtcaagcagatcattggtcagaatcaggggatctccaatattgagatcacagacccatctatcaaggagtttgagaagatcgcccggaaatatggtgtggactatgcggtgaagaaagaccgcagtagctccccacccaagtacctgatctttttcaaaggccgtgacgccgatgcgctgaccgctgcatttaccgagtacaccagcaaaaaggtcaagaaggccgagaaaacggaacgcccgtctgtgctggcaaaactcagtcagttcaaagagatggtcaaaaatgccgtggtggatcgcaccaagcgaaaggagctggaacgatgaaaaagacattggacatcaaaaagctcattttgctgaatatgccgtatatcctgctggggctgtttgctaccaattttggagaggcatggcgaatggcacaaggggcggatgcttcagaaaagtttctttcgctggttgcggttctgcctgggacgttgcaaagtttctggccaagcctgcatccattggacttgttggtagggctgtgctgcggtgttggtctgaggctggcggtgtatcttaaaagcaagaacaccaagaaatatcgacatggtttggaatatggttcggcccgctggggaacccgtgaggatattgcaccttacgttgatcctgtatttcagaacaatgtgattctgacgaaaacggagagcctgaccatgaacagccgccccaaggaccccaagactgccagaaacaaaaatgtactggtgattggcggctccggttccggtaaaacccgattctggctgaaacccaacctgatgcagatgcacagctcctatgttgtgacggacccgaagggaacaattctggtggagtgcggaaaaatgctccaaaggggtgcgcccaagctggggaaggacggaaagcccatgaaggataagcgcggcaaagtcatttatgagccgtaccgaatcaaggtcctaaataccatcaacttcaagaagtccatgcactataaccctttcgcctatatccatagcgaaaaggacatcttgaagctggtaacaacgctgattgccaataccaaaggcgaaggcaaggccggagacgatttctgggtcagtgcgactcgttcgcagacggtaaaaagtctgcgcacgagcaacggttttccgttgttcggagaactggtagtttgataggtggaatgacggggtaacgccctgaaacgcctacccttgatgggcgtgcattagctgtaatggctggtgtacgaagccccatgacaaaggctgagagtaaccgtaaccactgcctaaagtggtcgaaagcggtctggaggcagactgtgttacctataagccgagagtctataagatacctatggttagaatgttcgctttggcgggcggactgacgaacctgcgaatgtacaggtctaaaagaagaccacgcagaaatgtgtgggtgcgttaatgcgcagtcggtgtggtttagtagaaattgatcctacgaacgaccatgctgtgttacaggcacaggcaagccgacaggtctatagcaggaacctacgggtatgtatgaacagatagaactatcggaacgaggaaaggcagcagattccgcaaggaatagtctgacgaaaaacaataagcagacgaactgctgctgaaaagtagtggtcgaacctatgatgtgcttgcgttatgtgagctacggaggaatggccacaagtcggttgagataagcaggcattattcaatccaacataaggattcgagtaagaccaaaagggtcactttcgcaaaaaggaggtgatgccttatgccaaagaaaaacaaaactctatgtgcagatgacttacgtcatgccgagtattacggtatgcagccagtttttgatgaactctatcatcgaagtttggagggagaaaattttaccgaccttatggatttaattctgagccgggacaacattcttctggcatatcggaacatcaaagcaaacggaggaagctacacagcaggaacagacaacaaaaacatcagtgacatcgggtgtttaccgcccgaaacagttgcagagaaagtgaggtttattgtcacaggaagtcagcacggataccgcccaaagccggtaagacgcaaagacattccgaaaccaaacggaaaaaccagaccgttaggtattccctgtatctgggacaggctggtacagcaatgtatcaaacaggtcatagagccaatctgcgaagcgaaattcagcgacaacagttacggctttcgcccgaaccgttccgtggaacacgccgtgcagaaaacttacaccatgcttcaacgcatgaacctgcattatgtgattgagtttgatataaaaggatttttcgacaacgtaaatcacagcaagctaatgcggcaaatatgggcaatgggaatacacgacaagcagttgatttttattatcaagcggattctgaaagcaccgattagaatgccagacggcactacactcattccagacaaaggcactccgcaaggcggtatcatttcaccgttgcttgccaatatcgtgctgaatgaactggacaaatgggttgagagccaatggcagaaccaccctcttgtaaaggaatacgggtatgagaggaaaatcagaaactcgattacttttgaccggagcaaggcattcctcaaaatgaggaaaacagggttgaaagaaatgtatatcgtgagatatgcagatgatttcagaattttctgccggaataaagaggacgctttgagaacgaaagaggctgtaacggcatggataaccgagaggctgaggttggaggtatcgccagagaaaacaaggatagtcaatgttagaaaacgctattcagagtttcttgggtttaagatacgagtcagaccgaaaagcaggaagtacatcgtgcaatctcatatctgtgacaaaaagttggaactggaaaggcaaaaactggtggaacaggcgaaacgaattgcccgaccttcagagggaaaaagacctttggacgaaatacggctgtacaattcaatggttctgggaatacagaattattttcaacttgccacctgcatcagcattgattgcaggaaaatccacagacaggtcatgacagttttaacaaatcggctcaatacagaaaccgggtgcagacttgttcgagagggcggcgcaatgaccgagagcgaaaaagaacggtttggaaagtcggcaatgatacggtatgtatctggaatcgaccaacctatctaccctatcgcatacatcaagaacaagataccgatggcaaagaaagcggcggtttgcagttacacggtagagggacgggcattgatacacacgaacctaagtatgaactcatctgttctatcaggtttgaggaatcaaccgtctatggggcgaagcacagaacttactgacagcaggatttcactattctcggctcaacgtggaaaatgtgcgctaagtggggaactctttgaaaatgcggctgacatagtatgctggctgaaaacaccggcagaattgggcggcaaggaacgctatcgaaatatgattttgttccataatagatttcttccactcctgcaagagtgtcctaagaatgagctaaaagagatagccgacacgctcaaggcaacaaaggaactgatgttaaaagtgaacagtctgcgccagcaggctggtttgtccgcaatagaaaactaacatttcatttggtgattgattaaatgcttgtgaaaacaaccgatggaacgccggatgcggtgaaagtcgcacgtccggtgtggagtgggggaaaatccggcgataacttcaaaggattacctatcactataggcggaaacattgctgtattgcgcgttgattggatatatccactatgaagctccagtggaggagcaaaacttctccaccctcatcgagttcatcaacgccatggaagtccgggaggatgacgaggagttcaaaaatcccgtagacctgatgtttgatgcactggaagccgagaagccaaaccactttgcggtgcgtcagtataaaaaatataagctggccgccggtgatatatgctctaagtgacttcttaatcatgattttgtcatggttagtgaagcaatcacttagagcatttttgtttcaggaggtacagctatgagaaacgaaaaaatcaccccactgtacgagcgactgagccgggacgatgagttacagggcgagagcaattccatatccaaccaaaaacagatgttagaggattttgcccgccggaatgggctgccaaaccctacgcactttaccgacgatggtatctcaggcacccgttttgaccgtcccggatttttggcgatgatggaggaagtggaggcagggcgtgtagaggccatcgtcatcaaggacatgagccgcctgggacgcgactatctgaaagtcggtcaggtcatggagattttgcggcagcgcggtgtccggctgatcgccatcaatgacggtgtggacagtctgaaaggcgatgatgattttaccccgttccgcaacattatgaacgagttttacgcccgcgacaccagccggaaaatccgctctgtgtttaagtccaaaggcatgagcggcaagcacctgaccggcaccgttatctacggctatctgtgggacgaaaagcgggaacactggcttgtggatgaagaagccgccgctgtggtacgccatattttcgcgcttgcgatggagggctacggcccctatcagatcgcaaccaagttgtcagaagaaaaaattgaaatgccagccgttcaccttgcccgctatggcgagggagtgaacaagaataaggcctttgcggatatttatcgttggagtgcctctaccgttgttgaaatcctgaaaaaacaggagtatttaggccatacggtcaatttcaagacccgcaagcacttcaaggacaagaaaagccactatgttgacgaaagcgaatggacaattttcgagaatacccatgaggccatcatcgaccaggaaacctttgacaatgtgcagcgcgtccggggaaacgccagacgctacccggacggctttggggaggcatatcccctgactggcctaatgtactgcgccgactgcggcggcaagatgtatgttcaccgcacctataacggtaagcgtgttcctcagtacacttgcggccagtatggcaaataccctatcggctccctttgccccacacagcaccgcatcaaggccgaagctgttctgaccctgattgccgatatgctccggaccatcgcggagtattccaggaatgaccgggccgagtttatccgcactgtccaggaaacgcaggccgcccagcagaccgctgacatctctaaaaagcggaaacggctggctgccgcccaaaagcgggccggagaactggaacggctgatttgcaaaatctatgaggacaacgccctgggcaagctgccggacgcccggtatgaggccctggacgcacagtacgccaaagagcaggacgccctcaacgcggaaatcacggaactggaaaaagccgttaccggctatgagcagagccggagatctgcggagaagtttattgccctgattgacaagtatgagaacttcgacacgctgacaaataccatgctcaacgagtttgtagagaaaatccttgtccatgaacgcgcccgcaaaggcagccaggataccacacaggaggttgaaatctacttcaactttgtgggccgctatatccctcctgccttgcagccggttcccctgaccccggaggaacaggaagaactgcggaagaaggaggaacgcaaggacaggcttcaccagaactacttgcgccgcaaggctaatggcaagcagaaggaatgggaagaacgctacaacgccaagcgcaaggcgaaaatggaggcagcaaaggccgcgatccgggccgaggatatggagaagggcatttttaccaccgtcagccagttacccaggcaggagccgcgcaaggccaccttaccggccagcgccgcagtttaaccatcacagtgcaaaggaggacaaacatgaacgaattgacttacacccgctgcggggattactacatccccgacctggagttgtccgagcagccagaggcccccatcggcaagtatggccgtatgcggcaacgctacctgaaggaacaccggcccgtcctttacagcagcttgattttgagcgaaaagctgtacccgcacctgttggagattgaccgggcggcgcgggagcggatggacgccatgctgccccggatgatggaggcggcgggcgtcactgaggaagtgaaagcccgtgaccccatgcgctgggtgggcctgatgaacacgctgaaagcgcaggaggaggaaattgtgctgacagagctgatttatcaataattttgcaagcggaggctgctacttgcggcctctgtttgttttgcaattccgccatatcttttccttgaacttttatcctaaatgaaatataaagaatatgtcgtcagaggttgacaagcgcaaaaaaacaatttaacatataattagttaccgctaaccaaaaaaggaggaagatatgagtgaaagagttacatggaacagaatggtacggtgaatatgctacgctaactgatgaacataatgattatgttcaaatcgaatataaatgtaatggaacaggtcgtctctatgactacactcttttccctggtattgacttaatttttatggattttaactgctcagatacattccatgagcctattcctaataagaatatcatcgaaatccgtcattaccaaaaaggacgcgttgagtttgagctaagaaataataaagttttccacatgaaagagggagaattttgcatcaatgctcttgctaatatcccagcggcatattcttttccttttggatatagtgtaggattaagctgtgtgattgataaggattctgttgatgtggaaacacaacagattttttcgtactacaacattgatgttctaaatctcggacgagaattggaattagaaaaaaagtggtttttatgtcggacaccacagcggttgttacatatctttgaagaattgtatgctgcaaaaggtgttgaagagcgagattatttccgtatcaaattattggaactattttaccatatcaaacagctgcggattgaagatcagtatgaggcaacgtattatgccaaagaacaaattgaaatcatcaaacgcatccgccaacagctcatagaaaacctcgacaaaaaaatatccatagaagaacttttgcgaaaggagccaatgagcaaggtcacatttcaagctattttcaaacagatttatggcgatacgccctatgcacatatcaaaaagtataaaatgaatcttgcggctgtttatttgcaggaaacagatcaatcaatcacgcaaatagccggtgaacttggatattcaaatattagtaaatttgcgcgagcctttcaagaagtgtttggaatgcttccaaaggattaccgtaaagcaaaaaagtgatttaacttttgggctgttttcttgatgtacttttccctttggagtagttagagactgcaaaccggtgtaaaatgacagtgcggttagttattgccaaccacactgtcattttattttaaggaggtttcaaaaatggaacaaactgtgaagaaaaagtttggtattcgcgatattatgacgattgccgcaatgatggtaattacttaccttgtcgcaatggttatcggctccgttacgctgccttttccggtggtgtacctgtacggttctgccggcattgatgcttttattggagcaatcttttatctggtcgcagcaaaccgcgtcaacaaacatggccttctgtttgcgtgggccgcagtctacgggataattcagggcgtcatgggctatatgttcctgattccatatttcctggtggtagcactcattgccgagctaaccatgattggcaaggatacataccgcaatgctgtccgcaaccggatcggctggacggtaaatgccatcggcaactttgtcggttgcgccgtaccgctgtggtgggcgtgggacagctatcaggaaatggctgcaagcagcgggtttgatgcaaatactctgaatatgcagttctctatggtgacttctccggcactgatgcttctgggtattgccattactgcggttcttgccatcctcggtacattgttcggccagcggttgctcagaaagcatttccaaaaagcgggcattgtaggatgatggccgaagaaaaaaagcaaagacggattgaccggatcgatgggcgcacagttcttttcctgacgctgtgcgcctgtatcgtgaccttttttgcaacaagttttttagggcatgggatttttaccttttggatttttttgatcctttgctggttcggcttatataaacaggccctgggatgctttgcggtctatttagtggcgattgtatggctgatgattgagacgaaatatcagatcagcatcccctctccgctgctactcagcatgatttacaagctgttgcttcccgctatgcctgcttatcttctggctaaaatcccgtccgggaaattgacagccagcctgcgaaaaatgccgatccctacccgtatcatgcttgtattgattgtcatgctccgttttgctccgactgtactacatgaatttggcgaagtcagggaggccatgaaaatccgtggtttcttaaaatcggttggcaatgttttgaagcatccaatggacacattggaatacgccattgttccgatggtgttccgctccttaaagatcgcggacgagttggccgcttctgccattgtcaggggaattgaaagtccctacaagaaagaaagctactatgtcagccggatcgctgcgctggattactttttgattgttgtcagcgtgggagctgccgtgtgctgctgtcttttataggaggaatggaatgggaaaagaaattatgatccgtgacctgaccttttcctatggcgggaacggaaatcaactggaacacatatcgttagacattgccgctggggaggtcattgttatgaccggcccatcagggagcgggaaaagctctttgacgagagtgattaacggcctgatcccctacttttacgagggggaattaagcggagaggtttttgtggacggaaaaccgctgaaagagattccgtcctgggagcgcggcaaaatcgcagggaatgtatttcaagaccccaggagccagttttttgccaatgaggtagctggtgagattgctttcggctgtgagaactatgggtattcccatgaggacattcagaaccatgttcaccgggcagcggcagacatcaaaattcaggacattctggatcacagtctgcacagcctgtcttatgggatgcgccagaaagttgcgattgcgtctgcggaggcgattgacccggaaatctatgtcatggatgaaccgtccgccaatctggatattgcatctacctaccgctttgcagacattatccgcgctttgaagcagcagggaaaaaccattatcatagcagaacatcggctttattatctgatggatctggcagaccgcttcctgtgtgtgcagaaagggaaaattgtgcgggaatttaccgcgcagcagatgaaagccctgtccaatgaggaaatccgggcgctggggcttcgcactcctgacctgcaccagatcgagcaggcagaaatcccgtctgcggcaaccagcgaggttgttctggaagtgaaaaagctgaaccactcttttggtgagacgattgtggcaaaggatgttgactttcaatgccgcaagggagaagtggtagccctgatcggccctaacgggacgggcaaaagcaccataggacgaatcctggcagggctattgaaagagaaatccggcgaagtcgttttgttcggaaagcattgtagatcgaaaggccgcttgggaaaggtctggtacattccccaggatttagacagccagcttttcggtgaggacctgctggatgaactgactaccggcgcagaggtcagcccagagcggaaaaaagcggcggaggaaattctggaggccctggagctgatgccgtttgtcaaacagcatccctccacgctgtcaggagggcaaaagcagcggctggcccttggcgtggcgctgatgcacgaagcgccgatcatcgtactggacgaaccgacaagcgggctggacggtacgaatatgcggaatgtcagccggatgatccgcaagctggcaaagatggggcgcaccattatcgtcattacccatgatgcggagtgtgcgcttgcctgctgtgagcgggcaatacgcctggagaacggctgcattaccgatgattttcaaatcagaggcgcagagcttcttttagacaaaattggatatgacaaaaaggagggttagaaatggcacagcaaaacgagaagcagccgaaagcgaaaaccggactggcacgctgcctggaactggcttccggccataaagggctggtgttcctggcaggttttttggcggcgctggctgcgatctgttcttttgtaccgtacttatcaatctactacatcattcgggaaatcctgtttgtttacccggatatgtcgctcttgaatgtttccacgatttcgacctggggatggctgaccctggctggaattttgggaaacatcgtattttacttttttgccctgttgtgttcccacgttgcggcgtttggaacgctttatgaattgaaggtagcctttgccgaccacatcatgcatattccccttgggtatcatttgaccttgggaagcggcaagctgagaaaaatcatggacgaaaacattgaaagcgttgagaaattcatcgctcaccagctcccggactttgtggcctcgctggtcgcaccgcttgttctggtcatcattcttctcggaattgactggcggtatggagtggtttgcctggtcggtattgttctggcctttattgtgcagtttgcaggcttcaacggagaagcaaaggaaaaaatgcaccgtttccagaccgctcaggaaaacatgaacagcgcctccgtggaatatgtgcgcggtatgtcggagatcaaagcatttaatcagaccgccgattcctttaagcggttgagcaaatccattacagactatacctctttcgtgttggaatacgcattgggctggcagaactgtatgcctgcttttaccacaatcatcaacaatatttatctgcttttgattccggtgggtgttctgatcgggatgcatactacggatttcagggagtattcgctgacattcattttctacctgattattgtccatgcgatttccggtgttctgaataagatcatgtatatctcggagtcctttacgcagattgacggcagcgtggagcgtatggatgaaatcctgcgtatcccggtcctgcccgaaaagagtacggcggcaacaatcgaaaactatgggattgctttccgggatgtcagcttttcctacgaagccgattcccaggtcaaggccctgtctcatgtttctttctttgcggatcagggcaaggtgacagccattgtcggcccctccggtggcggtaagagtaccatcgccagcctgatctcccggttttatgatgtgacggacggaagtattcagatcggcggcgttgacattcgggacattccgctggatgcgctgatggataaggtcagcttcgtatttcaggatacgttcctgttcaagcagagcatcctggataacatccgtatgggaaatccagatgctacggaagaacaggtgattgcggcggcaaaggctgcaagatgccatgaatttattgagcagcttccgaacgggtatcagactgtaatcggcagcaccggcgtccatctttccggtggtgagcgccagcggattgccattgcaagggctatcgtaaaagacgcgcccattatcgttctggacgaggcaactgcgttcagcgacccggagaacgagtacctgattcaaaaagcctttgaaaagctgattcagaataaaacggttgtaatgatcgcccatcgcctgtctacgattcgtaatgctgaccagatccttatcatggaaaagggctgtctgattgaatccggcacccatgacgagctgctgaagaaggacggaaaatacgcgcagatgtggagcagctatacggagtcgatcaactggaaaattggcacaggaaaggcggtgtgatctatgagtaagctgaaagaaaagttaatgctgtcggagaaaggctactccgacctgaaaaaagcgattacggcctgcacaataactaatattgcgctgttgcttccgtctatggtagcctgcctgctcttttgggagttgttaaagccatttactggagaaacaatttcgtgggccgcattgtggaaattgctcggcttggggctggtggcggctattctggtgtttctggccgcgaaaaacgattataggaaaacctatattgcttcctataaggaggccagcacgaccagacttcggatcgcggagcatcttcgcaagctccccatgagcttctttaacacaaaggatttgtccgacattaccacaaacatgatggcggattgcagcagcatggaatccatgctcagcagtaccatcccgccgctgattgcgaatataatctctgttactctgacttgtatttgtctggcgttttttgattggcgcatggcccttgcgattttctgcacgatgccggttacattccttatcatcttgggcgggcgcaagctgcaacttcatctgtttgacaaacaggtggatgtgaaactggaggcgtccagccagattcaggaatacctggaaggtattaagatcatcaaatcttgtggtcttggcggttcccgctttgatgcgttggataaagcactccaggccatgaaaaaaatcgccattaaagtggaactggcctccggtattctggttcagggagccagcctgatcctgcaagcagggcttggcattactattttcattggaacggtgctgataaccggcggcaaaatcgaattgctccctctgctggtgctgctcatgttctccacgcagatttacggcccgatccttgccattctctcacagttgacttctctgtttcatttggagactgtcaccaaccgtatgcgtaccctgctgaccacgcccgctatggagggcgaggataaggatgtatccaagtatgacattgaactgaaaaatgtcactttcggatataaccaggacgatgttatcaaggatgtgtctttttctattcctgctggcagcgtaacggccctggtagggccttccggcagcggcaaaagcacaatttccaaactcattgcccgcttttgggatgtaagaaaaggtcagatttccattggtggtatggatgttcgcaccattgaaccggaacacctgatgcgctgtatgtcctttgtatttcaggatgtgaccttgttcaacgacactgtttttaacaatatccgtgtaggcaacatgaacgctaccgaggagcaggtcatggcggcggcaaaggcggcatactgtgacgaatttatccagagattgccggacggttatcagactgtccttggagaaaacggcagcactctttctggtggtgagcgtcagcggatttccattgcccgcgctctgctgaaagatgccccgattattcttcttgatgaagcaacagcatctcttgacccggagaacgaggttttaatccagcgggccattgcaaagctggtggagggtaagacagtcattatgattgctcaccggcttcgtaccgttgtggatgccgaccaaattctcgttcttgataacggtagactggtggaacacggtacacatgatgaattgatgaaaaagaacggattgtaccataaactgttccatatccaacaggagagtcttggttgggctgtgtaaattgttttagaagggagatattccatgaaacttcgtgcgtccggggaggactatctggaaaccatccttgttctccataagaaaacgggtatggtgcgctccgtagatgtagcccggcacatggaggtgtcaaagcccagcgtgtgccatgcagtggctaccttgcgggacggcggctttctcacaatggacgaggatcactttctccatctgaccgatgtgggccgcgaggtagccgaaaaaatctacgagcgtcactgcttctttaccgagcagcttatcaccgcaggcgttgaccccaaaactgcggaggccgatgcctgtcgtattgaacacatcatcagcgatgagagttttgaccggctgaaagaggcagccgaacaagagcaaaactaaaaccgaataagccaagcgatcctgccccgcaagacggggaaagaaaaaaaccgttgcagggcaggcagctttgtgcgcccaaaatggatttaccgggtactgcggcggttttgagtaacatcaaggccgccgttctttatgccctcgacaaaggagtgacgactacacgctgacacggcggctttaggagggaaccgccatgaagcacattgaccgccgacaaattcagacgatatttcactaccgtcaaaaaaagcccagtcaacgaacaggccccgtctggcagccggtgcgaaaattgtcattctgtaagtgaatattggagtttttgcgctcgaatagctttctgctgtccgggcgttttttcatacctgtggggccgtaacatcgggccagcatggcccgaaccttggccccagtgccgttctccgccgccccattcagatttaccaaaaaaatctgaatggaggaaaggcagatggaagttaccatcaattataacggacaagctgtggccgtggaggttacgctggaagtctatgaatttcttgaccgggccgatcataaaacggagaacctgttccatgaacagcggcggcattgggatggccgggagttcgacgagtacatcattaccaccgagggtgtaggggtctacggcgaaacgccggaggaatacctttgccgcatggaaacgctgcatgagctgatggctgttctggacacctgtaccgaggcccagcggcgccggttcctgctctatgcgcttgacgggctgagccttgcagagatcggtgtgctgtgcggctgctccaaagtggctgtgtatcaaagtgtggaggcagtcagaaaaaaatttataaatttctttgaaaacaggcttaacgaatgacctgttttctggctaccaagtgaaagggatcatttcccttatctcagcgaggggcggacagcggacgagctgcccgcctctccgattttcaggaggtaagcctatgaaaacaatcaatctgcggtggatgtatccccactaccggcatgacgagtttgtggatgttacggacgaggtatgggcagcgatgtatcaggcccagcgggagatggagaactatgagcgtcggaaagtctaccaccgcgcctactactctctggacgcatacagctggctggaaaattacgcactggaacacagcagatcgccggaagatattttgctggaacgagaagaaataaccacccgcctgcacctgattgcagctctgcctgcggctctggctcatgccactccgacacaggcccgccgtgttcacgcctactacattgccggtatcaagcagccggaaatctcccggagagagggcatccacagcagcaaggtcagcgttgccatccgtcgggggctgcggaatatgcgccgctgctatgatgacctttttcaaacagagtgagggcgtgcctatgcagaccatcaatctcaaacaatattatccattttgcaaagaggacatttttgtggaggtgtccgatgagatcgtcgaagcgtttcttctggataagagggccgaggcttccagagagcgcaagatgttccgatataaggcgttttactccctcgattgtaacgacggaatcgaaaatgccgcaatcggctgggcacagccatcgccggaggatcatctgatagaaaaagaagaattagccgaatacgaagaactgatccggcgattgtatgaagccatttcttccctgccgcctatgcaggcccgccgtgtccacgcccgctatatgctgggtatgaaagtgaaagatattgccgcaatggagggtatcacgccatcacaggcgggaaaatccatccatgccgcactgcggaggctgcaccggtactttgcgcgtcagaaatggacggtcaatctatgagcgtttccaaagaaaagaggtgcatgacatggacgaaaaaattacagctcactcctcaaaagaagaacaggagaaagtcctgaaggagatccgacagcttgaaaaccgcaagaagattttggagaacaagcagcggaacgaagaacgcagggttcgcacccgccgcctgattgagcgcggagccattttggagggtatttttccgctggctcccaacctttccggcgcagaggttaaagcatttttgattgccctgtcccatcttccgggggctgcggaattgactgcaaacctgtcacaatccggggacacgccataagtcccttgtttacaagggcgcacttatacaccgttgccggtgctgtgcgccctgccgggggcgttgcgtacttcgtccgcgatgggaagctacgctccccaaaccccttgtgcgctctgcgcagtcgtcggacacccgctttgcgtttgtccggctccacagagcctgctatccccctcactgaaaggaggtgttccccatagatttctgtcatatccccgtcagtatcatcaagcgcagcgcaggccgttctgccgttgccgcagctgcttaccgcagcggaaccaagctgacaaatgaatgggatggaatgacccacgactacacccggaaaggcggcattgtccatgcggagatcatgctgcctgcccacgccccgccagaatttgcagaccgttctatcctctggaacagcgtggagcaaatcgagaaagcaagggacagccagcttgcccgtgagatcgaggcagccctgccccgtgaactgtccggcgaacaacagcttgcccttgtgcgtgcctatgtgaaggacaactttgtagacaaaggaatgtgcgccgactttgctatccatgacaagggaaccggcaaccctcatgtccatatcatgctgacactccggcctttgaaagaaaatggacagtggggcgcaaagtgccgcaaggcatacgatctggacgagaatggacagcgtatcccggatgggaaaggcggctggaaaaatcatcgggaggatacgaccgactggaacgataaagggaatgtggagatttggcgggcagcgtgggcagcctacaccaaccgggcactggaatctgccggtagaccggagcgtattgaccaccgcagttacaagcggcagggcattgataaaattccctctgtccatctggggccagccgccagccaaatggaaaagcgcggtatccgcaccgacaagggagaagtaaaccggcagatcgccgccgacaacaaactgctgaaagaaattaaagcccgcattacccgtctttatcgctggtcgaaagacgaagcggaaaaaccacaaacacagcaaagcagcttgaccgctttgtgggaggcccagcagcagttgaacactccccgcacccgcaccggcaaaatccgggctttgcaggaaagcgctgcactatttagctttttacaggcaaacggcatccagtctatgcagcagcttcatgaaaaaatcgctgatatgaacagccgttactatgacctgcggggaaagatcgtcaaggctgagcgccggatcgccattcttaccgaacgcggggagatgtgggaacagtacaaccagtacaagtccatccacaaacagcttgccaaagtaaagccggaaaagcgggaacagtttgagcagcgccacagccgggaactgatcctgtatgacgcagcagcccggtatctgaaagaattgaaagacagcggcgaggggatcaccccgaaggcatggcagcgggagatcgaccagctgaccgccggaaagcagacggacacgcttgccatgaaatccatgagggaggatttgaaagcagtggaacggctccgcaaaaccgccgagcagctgtcccagcaggaacggaacaagtctcacgaccgtgggccggagcggtaaaggctaccgcgttttggcgtacccctgtcaagtgtgtcgcgtttcacgacatacctttgcatacagaaaaaccgccgtacaggtttccccatacggcggcagactgtttatttgccgaacaagtcgctgtgtgtgccggtgcgggccagcgtcagcaccagaacatcatcctctatgcgatagataagcagccagtccgggagaatatgacattcccgatgacctgcccaatcgccggacaggtcatggtcgcggttcttatccggcagcggttcgcccattgccagcaatgctacgacctgctccagcagctcgatcttcaagccacgcttgatggctcgtttgtagtcttttttgaaactggtcgtgtacttgacggtatatttggtttctttcatcttttcaggtcagcaaacaactcgtcaaggtcattatagccctttacagacgggtcttttgcaatcctttccgcttccagcatggcagcaaccgtttctttgttcggctgttccagccttacctcaaagggaatgccgccttcacgaagcgactggcgcacaaagatgttaaacgccgtagtcaggttcatgccaagttcagtaaacagtgcgtccgcctgcgctttcaaatctgcgtccatgcggatactgatgtttgtggtatttccagccatacgatcaacccctttctgctggcaattatagtatatgccatttgcacgaagaaaacaatactttgcacgaatatttaacaataaattcattcgaggaggttacacgctttatgaaagaaatcatttatgaagaacaacaagactgaacctatccctgtcatggattaccgccagtatcgcagagcgcggaaactggtgcatgagtgctgtaactacatcgacggaaactgtatcgctctggacgatggggaggaatgtgtctgtgtccagtctatttcctactccctgttgtgcaggtggtttcgggcggcggtattaccgcaggataaggaactggaaacggcgctgttccaccggctgaatgctaagaaatgctccgtatgtagggcgctgtttacccccggttccaaccgggccaaatactgcccggaatgtgccgcacgcatgaagcggatcaacgccgcaaagcgcaagcggaaacaacgggagaaatgtcacgctttaggggctgaaaaacccttgtaaatcaaggcttttttcgggggtgtcaaaggcagtctgatagatttatcctctgccccctaaaatagccttaaaatgcgtacagaatcccaagagaaccccaaggaggaaccctatgtcagacaatcgaaaatattattacctgaaactcaaagaaaactattttgacgatgattccatcgtgctgctggaaagtatgcaggacggtgtgttgtattccaacattctgctcaagctgtatctgaaatcgctgaaacatggcgggcggctccagcttgacgaggacatcccttacacggcgcagatgatcgccaccatcacccgccagcagatcggcactgtggagagagccttgcagatctttttgaagctgggccttgtggaagtgctggacagcggcacattctacatgagcaacatcgaacttttaatcggccagtcctctaccgaggctgagcgaaagcgggctgcgaggctccaaaacaaggctctttccgcgccccggacaaacggcggacatttgtccgacattcgtccaccagagatagagatagagttagagaaagagatagagataaagagagagatagagaagggacaccccgcccacgcctatggccgttaccagaatgttttcctgacagatgaagaactggcagacttgcaggccagctttcctgctgtatgggaacagtacatcgaaaaactgtccgagtacatggcttctaccggcaagcgttatcagagccatgcagcgaccatccggcgctgggccggtgaggacgctaaaaaagctgtcacaccctcacgcaaccgggattacagcgtaaaggaggatgaaactgtatgattgagattaccgcagaaatccgggcgttcatcgacagggcagctgtcggtgtggaattggctgaggacgagtatatagatccgtcagacggtctcatccactgtaagaaatgcggcggccagaggcagaccgttgtgccatgctttgggaaatccggctactttatgccgcgctgcatctgccagtgccagcgggaggctgaggagcagcgcaaggctgctgaagaacggcagcgccgcatggagcgtatcaaacgccgaaaggcacagggcttgcaagaccgttatctgtacgactacacatttttcaatgataacgggcaaaacccattgatggacaaggctcacgcctatgtagagaactggaaagaggcatataagagcaatatcgggcttttgctgtttggagatgtgggaaccggcaagtcttttttcgccggatgtattgccaacgctctacttgaccaggatgtgccggtgctgatgacgaacttccccaccattctgaaccgcctgaccgggatgttctctgaggacaggtcagagtttattgccagctttgacgaatatgacctgcttatcattgacgatctgggtgtagagcgcagtacagaatatgctatggagcagatgtttttcgtcatcgacagccgctatcgcagccgcagacccatgattatcacaacaaacttgaaactgtccgagttgaaaaacccgcctgatctggctcacgcccgtatctatgaccgtattctggaacggtgtgcgccgattctctttgacgggaagaatttccgggaagaaaatgccggtgctacccgacaggcagcaaaagacattgtaaacagtaagcacgattgattttttaccgggcggtacagacccgttcggagaaaggagcgccatgaacaaagaaccccgtactatgcaggtggcagacgccgttactgcgtccagagcgccggaaaacacgccagcgatggtaaagaaaatcggtaagacaacctacaaggttcatgtccatttcagcaataccagcacagaaaccatgagcgataaaatcaagcgtatgctcaaaaatgaaattcagcagatgtgacagactgataaacgacgccgccttgtgctaaactgatgatggtacgcaccaaaatttttgtcaaggaggacacgaaaatgctttacacagaaaaagagaagcatgaaattgaacgagtaaaggaggtctttgcggaacatctgcggcaaagccctgattttgaactgctctggtcggacaaggtaggctatgtctggctggcgattggtgtaaatccagtctatgtggataccggtatcaggatagaatctgccgccgatctctgctgcaagtgtttggatgatgttgctatggatgttttgtatatgacgggcaacgatcatgcactggaggaagccgacccgctggaattggccgaaatcaagcggcgctgggagccatatatcaaccagctgccagactatgcgtatctctgcaaagacctgctgaacggaaaaatgtaatctatcaaacgaggtgtcaggagccatacggtgcttctggcaccttttttgtagatttttgtgaattcgattaaaaagtccttgacaatttgtctctggaaaaacagccaagtcgattcttatttcctgtggtgcgcgccttgccgtatttgacattgcagagttgcgcgaggtcacagcttatgacgagctggagctggatacgctgggagaccggaaaactgccctgttcctcattatgagtgatacagatgacagctttaacttcctaatctccatgtgttatacccagcttttcaatctgctctgcgaaaaagccgatgatgtgtatggcggcaggctcccggttcatgtgcgctgtttgattgacgagtgcgccaacatcgggcagattccgaagctggaaaagctggtggccaccatccgaagccgtgaaatctctgcctgtctggtgttgcaggcacagagccagctcaaggcaatttacaaagataatgccgataccatcatcggcaatatggatacttccatcttcctgggtggcaaagagccaacaacgctgaaagagctggcggctgttctgggaaaggagaccatagacacttacaacaccggagagagccggggacgggagacctcccactcgcttaactatcagaaattgggaaaagatatgccataattcatggtgacgagttcagttgccttgaataacagatgaacagggacacgatcaactgaattcggagaaaaatcgaatacaggaggtcgctatggagaaattaagaaaacgaatccatgataacagcaatggtctggactatgttctggtcggggattactatataccagacctgaagctggcggaagaaaaccgccccactgggcagtggggacggatgcacaaggcatttttgcaagaacatcgccccggccagtacaatgaattgcttctgtcgggaaaactctggacgtatcttgccgatctgaacgagctggccaatgattggctggcgtgtattatctcgcagatgcaggcggcggaaggtgttaccgaggaactgaaagctcgtgaccagcttgcctgggtcagagccgtgaacagcattcgcaaccgtgcagaggaaatcatccggtctgagatgatttatgtttgaggaggtgcctgtctatgagataccgtatcgaatacgctgatggacgctgctgtaactttgccaatggtagggctgacctgctggaatggctgaaactgctggaggaggaagaaatcgccgacattcgcaaagtgtataaaagtggcgtatcagattctgttctggaaacataccggagttatatccgttcagcataaggaggggcacttatgggtacagatattgaaaaactgattgatttgatgattcaggagcggatgcagaaccagttcgcaaagtggcggaaggcagaaaccgacaaagagaaaaaagctgattaccttcacttggaaaccgagtatgaaaaagcaatcagtgcattgtctgaggaacagaaggaagctgtaaggcactactgcgattctatcttcgattccggcacagaaagcgaatgcttcttttaccggctgggcctcaaagatggtatccgcctttggaagtttatgaaaaagctgatgaaaacggtcagctaacagatgtacaaccgcatattttattccgcccacaaatggggcgaaagccgtccaacggtacaggttgggcggctttttctctacttgcgcttcttctttgggggcatataatacggctgtggtttggttttgccccgcatattatttgggtttttaagcagtttggacaggttcagtatccgcagaaaagccgaaaagtcctcggatgaaattttttcaaaaggaatctgcattttatcacagaactcatggatcatagcttctgtgtcggtccccatctgtatggcctgttcaaaattctctttgacctcatccagtgttggctgtgggtcggctgtggttttgtctttcaaatgagcttcccgtatatcccggacaatgctgtccagatcatcatggaggatatggctgtaaaaatcgttctcctgtacctgccccagttccagcgtccgcatatacagatcattttctcccggtgcgtgttctttcagaatggtctgccgggtagcttccagaatcagattcatctggttcacccgcatatcagcgatccggtcaataaagatttccatatcaaccatcagccgtaaaaaattcggatgggtcgccagttcacaaagcaggcggttgttaatctttccgctgcttaataatgcaaccatatcatcactcaaatgcagagcctgaagctccgcgtttgggtgatttttattttccgtcagacccatcaggtagtcggtggacaccccgtaaaatttcgccagtgttgcgatggcaaaggcactgatgtcctgttctttccgttcgtaattccccaacgccgccttagacagaccggtctgcgcttccagctgttccagtgtcaggtgcttatcgactacccgtaaatctttcagccgttcctgcggcgatagttttgtgtacatagagatgccccctttcctcaggataaatcctgctcttgtcgtccattataacacatttccaaaagcgtggaaatatggcggtttttcggatttttccaacctcttgcatatacgggagaaggctgtttttttcggtaagatagttcttgtcaacaggcactgaaccttgaaaatcgaatgaccggctgcaaggggtatgacctccgggaaagtgacgccatgataagagcgcaccaaagaggacaatacgccgggaaaattccgggcaggatcggcttgcaggcagaacggcggacagaaaacaagtttatcatgcggggcgcatggctccgcagcaaagaaatggaggtagatcattatgaaactgaatatgaaggaaaagaaaattctttacgcctacggctgtcccagccatcacaacacagtgacaaggctgaaatggctgatagcattgactgttgacccggaggcgaaaagccagatgcttcatcttgctcgtaaaattgagacagagacagaggaaaggtggtacgaagccttttaccatcatctgcgtatggagatggacgaatatcgccggattagacgcagtctgcgtgcgctgaaagcaaacaccgattatgaggaggaactgtatgaggaagctgtctaaatatgaaaaagaaaccatcatcaactggaatgagggcgagacgattgccagtatctacacctttaatgccagcttgaagcgcaggcttgcagatttcagccggaagtaccctctgctgtgccgcttggaacgcagtacgccggaaggcagcgtgacctatgtactggacaagtcccgactttcgatccggctggtgccgccgtacagcgaagaacggctggcagctgcaagggagtacgcaaaagagcatggctttcaggtcatacagacagaagaaaaaatcgcttaaaatgagggcgatttacgaaaaaatatcgggtctgcacccgctgttttgatcggcaattcccgcaggcgtattctgtatccacttctcgactatgggcgtaaatgtacggatacggagccggcgaaactggcaaaaaccgcttctgcggtgaaagccagcttcgccggtgcgggagtacagagggcagccagtcctttgtgccggggtgcaggggcggcagcgcactgctggggtcaaggggcaacgcccattggcgggttgagggcagccgccccatcgggtcaagggtgaaacgccttgcccagggagagttgatgctttgcgtcaactcgtactgggttattacctgacgcaaaacctcgcaggtctggcggctttgccgccctccccagcccggaacatctttgcaggaaggaggaaaaatgtttgaaattaacaagacacaatggacgatctgggaagcatggcacttacaatccccggcacaatgaccgtcggttcgatgtggaaaacagcgaacacattgacgctgagcgtgccagacaaaatgtgtactgggactgttaccggggctttacaacccacgactttcgggaaagccctgagcaaccggatttcagttttgaggaaattgagaggatgtattactatgagcattattccgatcatgtggatgcccagaatgcccggaacgagaaaacccggcacaccgagcgcaaccgcactgtagatgatctgttgaaaaataacaagacctgcccagaggaaagtatctaccagattggcaccatagaagaatccgttccaccgggtactttggcactcattgtcagcgaattttacgaggagtttgaacggcgctttggttcccatatccacattctggactgggcgctgcatctggatgagggcacaccccacatccatgagcgccatgtgtttgactgtaaaaaccggtatggggagctgtgtccccagcaggaaaaggcgctggaggaactgggggttgaattgcctgatccgagtaagcccaagggcaaacacaataatcgaaaacagacttttgatgcagtatgccggacaatgctttttgacatcagccacaagcatggggtgcatctggagcaggaaccatcctatggtgggcgggcgtatctggaaaagcaggattatatcctgatgaagcaaaaggagcagctggcggcgcagggacaaaagctggaagaattgacgcttaaaattgaggatgtggacaatctgattgatgaggtgtccagcgttgcttatgacaaggcggtggaattggtaacagacgaggtaaaaaccatgacccatcaggaagatattgatatgatcgaggacaccaaagtatggctgcaatccccagagcgaaaagcacctaaaaaggaacgggactatgcagtggcaaggctggatggtgtggtacgcagaatccgaaaagcaatgcagtccacactggaaaaaatgaaggctgtgctgcttcatgcggataagaagaagtctatcacagaagaaatcaaaaaacagacaaagccttccattgtggaagcgctgcgtcgaggaatggaggagcaacggaaaaaagacagtgaaaagcaggcacaggagaaacagaaaaaacagaatatggaactgtaaggcacttgccgttttcattgtgaaaatgtcaggtgtctttttagttccctgaaaggaagatgcaatgaatgtatttgaagcggtcaaacagaacctgaccacccgacaggcggcagagatgtacggcattcaggtcagccgtcatggcatgacagtctgcccgtttcacaatgacaagaatcccagcatgaaggtggacagacggttccattgttttgcctgtcaggcagatggagatgtgattgatttcacttcccgtctttttggactaagcagtaaagaagctgccttaaagctggcagacgacttctcaatcagctttgaccgcaaaggccacgatccgccacaaaagagagtgatcaaaagaaaaatcagcgaggaaatgcgataccggcaggcagagcagaaatgctttcgggtgctgtgcgactacctgcgtttgctggaacgatggaaagaagaatatgcgcccaaacagccagaggaagactggaatcctttgtttgtggaggctctgcacaggcagccatatatcgaatatctgctggatcttcttctgtctgatagcatagaagaacgagctattgtagttgctgagtatggaaaagaggtgaggaaaattgaacagcgaatatcagagtttaccgccagccacccagcaggctgtgatgagcgcagccgaagccatagtgccagaacagagcgttgatgaggtgcggcagagactttctgttaccgacaaggggaaaacagccaacaccatcgacaactgccggattgtgttctgctgcgatccactcctgcgggatgccgtccggctcaatctcctgacagacagggtggacattgtgcaggatttaggctggcgcaggaataccagtgccctgacggatactgatgtgaaatatcttctcctctattttgagaaaaattatgagttgaccagtgagaaaaagattacggctgcactttccatcgtagcaaacgaaaactgttaccatccgattcaggatgtgctgaacagccttgtctgggacggtacaccacgcatccgatcctgtctgcaccattttcttggtgctgatgaaagtgactatgtggaagaaatgctgaaacattttctgctgggtgctatacgccgggtattccgtcccggttccaaatatgaggaaatgctttgtttggtgggcggtcagggtgccggaaagtccaccttcttccggctgctggcaatccgggacgaatggttctctgatgacttaaaaaagctggatgacgaccgggtattccaaaagctgcaaggtcactggatcatcgagatgtcagagatgcttgccactagcagcgcaaaaagcattgaagaaatccgctcctttatcagccgacagaaggaaacctaccggacaccttatgaatctcagcctaaagaccggcttcggcagtgtgtgttcggtggttcctcgaatacgctggacttcctgccgctggatcgagccgggaaccggcgctttctcccaatcatgatttacccggagaatgcagaggttcacattttggaggacgaggacgcttccagagcgtatctgttgcaggtatgggcagaagctatgagcatttaccacagcggcaaatattccatgaaattcagcaagtccatccagtgtcaactggtggaggtgcagaaagacttcatgccggaggacaccgaagccggacagatacagggatttctggaacactacaccggaaacatggtctgctccaaacaactgttcaaggaggcactgggacacacctttgatgagccgaagcggtggcagctgcacaatattaacgagatcatgaacacagtcgtgactggctggaagcctttttccaatccccggatgttcgccggatatggcagacaaaagggctgggaacgggacacttccggcaacgaactgcccggcaacgaaggtggatttgtggaactgagtgaggaagaatgccgccagctggaacttccgaaggagtggatcgcctgacaaggacggtctgtttccgggatggttgccggttggttgccgggttcgttgctggtaaatctatggttttgatatagaaaaagtccgtgaataaagggcttttatgatctatctatgtttccggcaacgaaagcaacgagattttacaagaaaatttgaaaagtaagaaatcaaggtcagacggtagtttacaggttttttgatgtccgttgccggacttcgttgccgcagccaccgtctgatccactattctatggagatagcctatggagaaaaacaagaagcagaataaaaaagtccagtttgtagtggttcgtgagttttccggggacaaaaccatgcgagaagcctttgagcagctgatcgagcgtcagacctgcgaacacttcgaggaatggttggagcatcgggaaatggcacagaaagcggcgtaaggcagttgaatcatggacagggacatggtattataatgatatcgtgtccctgttcatagaaggagaacactatgagcaggaaaaaacaggttaatcagaaaatcacagccctttattgccgtatctctctggaggatggcggcgataatgagagcatgagcatcagcaaccagaaacttatgctccgggactttgccgaaaaaaacggaatgttccagtatgagtattatgtggatgacggttatacaggccgcaatttcaaccgcccttcttttcagcgcatgattgccgatattgaggcgggaaagatcggctgcgttatcaccaaagacctgtccagactgggcagaaattatatcgaagctggcagctatatcgaaatctttttcccaaaacacaatgtacgctatattgccattacagacggagtggacagcctgacccgtcaggaaatggacattacgccgtttaagaatatcctgaacgatatgtacagccgggatatttccaaaaaggtgctggcagggcgtatgacccgttcccggcaggggaagttttgtggtgggcagccgcccctcggtttgatgcgtgacccggaggataaggggcatttgatccgtgaccctgagacagcaccggtaatccgaaaaatctatgatatggcgctggatggctggggatgtatgcggattgcaaagcagctcatggatgataaagtcccgatcaccagagtaaaaagcaacacagaatgtgatgtaaattactattcatggggaagtgcaagaatcagccatatcctgcggaatcccttttataagggcgcacatctagtctgccggacacatcagaaagggattcgctccaacacctatgacattatccctcgtgaggactgggaaattatcgaggattgccatgaagcaatcatctccccggaagaatgggagcaggtgcaggaaatcattgaccgtagaccaaccattatgaagggcaactcctgccccttttataacctgttccacggtatcatttattgtgagacttgcggaaagtccatgcagatgcggtatgaaaaggttggcagaaccggaaagaaccgttttaccggcgaacagcgggaaccgattgataaggcgtattatatctgccagacctacaacaggctgggcaagaacgcctgtaccagccacaagatcgaagccagagatttatacaaccttgtgctgaaagatattcaggaactggcaaagactgcgctcaaagatgccgatgctttttatcagcggttgagcagccggatggagcgccggtatcttctggacgcctcccagacacagaaggaatgtcaacgactggaaagcagaaatcgtgaaattgatgaggtgttcctgagcctatataccgataaagcaaaaggaatcctgactgagcagcgttttatgaagctgacagcaacactggaacaagagcaggaagccaaccaaaagcgcctgcaagacctgctgttgatgatgcgccactctgatgaacaggaaaatgaagtccgcactttcatcaaagaaatccggtactatgcagccattaaagaactggatgaagtggtgctgaaccggctcatcagcaaaattctggtgggagaagtcaaaaagattgatggacagaaagtacaggaagtcagaatcgtttataactttgtcggtgagataccggagataacagaataaacatggcagcccttctctcatttcccggggaagggctttttaatttatttaatttattttactttctgtcaatagaatatacaatccacaaataatgagaacaagaaataaaactgtaggaatcaacaatccgttttccaaaatgcttattatcattcttccaggtggtgttacccactcaactgacggattttgcattgctgctattatcattcctacaacgccaacaacaccacctaatactaaaaaaccacctttgatacatctcttcataatcagtttctccttatcaaatcctgattttatatttcgacaatggaaatttaaatgtcccttttctaattgatggtttattgttgatttcctccgaaattcccgatttctcacattgtccaactccagataaactggaagtcatttattttgttgcggcaatacacatccaatgttttttggcatttatatacgtttttatctctgtgaaacccgcttcttttaaagcagcaacaagctgatcacgattataaatcttcataccgccgattatctttgtccatttttcatctgaggcattcgtaccatcgctctcgttacaaatcagaaatgttccgccgcttttcagaacgcgatttacctcggaaaagcattttttcagacccggccagaaataaactgtctcaaaggcggagacataatcaaagacctcatcagaaaagggaatcgccgatacatcgccctgaagcaccctgcattttccctgcttaatggcagcagcgttcagctcttgagattctgccacactgacctccgaatagtctagtcctgtcacatgaccgtttctgcacttgtccagccaggtcgcaatatttgcgccgcctccgcagccgacatccagcaccttagcgtctggcttcgcggagatatttgagaatccccattgcgacaccttggcgtggccgctgttcatcatcttcgccatcagtttcccgccgaagccttgcggcttacgggtgttttcaaaaaagttcattgcaatattctccctttcaacttccgatttttcgctatgagtgattgataccaatagttagcaacatctaactgacagtataatatcggaacatgaatttttcaactgctgcgccagattctcacccaactatctttcctcaacacaaattgagttcaccacttgacattgcgtcgaatagaagccatttttatgaataaagcttgatttgtttgtgaaaaccgctatttgccttgacaaacgtatctgtctgctgtattataacattgttacatagcactgttatatggaggccgtcatggaatcaaaagcaccggatacattagaaagaatacaacaggctgctctggatgagttttctgaaaaagggtttcttggagcctctctgcggcagatcgtgaaacacgctggagtaactacgggggccttttacggctatttttccagcaaagaggctctgtttgcttccattgtagaaccgcatgccgctattttgatgagtaaatatgtggatgcgcatatctccttttccgagcttcccgcagaggaacaaccggagcatatgggcgtggaatcaggagcttacattcattggatggtggaatatgtctgccagcacagggaaccggtaaagttgctgttttgcggcgcagaaggcaccggatatgaaaactttattcataacatggtggaactggaagtggaaagcacctttcgatacatggagacactccgccgcctggggtacaatatcccagaattaagcccgtctctgtgtcatatcattgccagtggtatgctgggcggccttgttgagatcgtggttcacgatattccacaggaacaggccatgtgggatgtagaacagctgcgtactttctatacggccggatggttgaagctgatgtcaccttaattgctgcgattgcgtcagtgatatgcaggatgcgctctgcccctttcacaagcagagcgctgcgtgatatactttatttttttatttgtaagttagtatatgctaactaatatatttctcactattttaaggaggtcattcgatgaaacaagaaaaaaagaacgatgtggctgtcctgctggaatatgcgggaagccgcagaggcctgacctttttagggctggccctatcggcggtgtccatgcttttgagcatggctccctacatttgtatctggctggcggctcgtgatctgattgaggcagctcctgaatggacacaggcgcagaatgtttccaaatatggctggatcgcctttgcgttcgcagtgagcggcattatcctgtattttgcaggcctaatgtgtacccatctggctgctttccgtacagcttccaacatacgaaaacaaggggttgctcatgtgatgaaggctccgctgggtttttttgattccaacgcctctggtctgattcgcgggcggctggatgcggcggcagccgacaccgaaacgctgctggcacataatctggcagacatcgtaggcactatcgtgctgtttttgtcgatgctggtcatgatgtttctgtttgattggcgaatgggggcagcctgccttttagcggcagtcatttcggtaattgctatgttctccatgatgggtggcaaaaatgccaaactgatggcggaataccaggcggcccaggatcgcatgacaaaagcgggaacagaatatgtaaggggaattcctgtagtaaaaatatttcagcagacggtctactcgttcaaggcgtttcaggaggctatcgaagactacagcagcaaagccgaacattatcaggcggatgtatgccgtgttcctcagtctgtcaatttaacctttaccgaaggagcgttcgtgtttctggttccagtggcgctgttccttgctccagacgcactggcaaacggcagttttgctggctttgttgccgatttcgttttttatgccgtattttcagccatcatttccactgcgcttgcaaaaataatgtttgcttcctccggtatgatgttggccagtaccgctttgggacggatcaatcaggtgatggaggcgcctaccctggaagcacccagtcacccacagtcccctcgtagtaataaagtagaatttaaggatgtgagttttacctataacggatcggaaagccctgcactatctcatgtgtctttcacagccgaaccggggcagaccgtagctctggtgggaccgtccggcggcggaaagacaacggcggccagcttgattccgcgtttttgggatgcaacgtccggcgcggtggaagtcggcggagtcaatgttgctcagatcgatccgcatgtccttatggatcaggtggcttttgtattccagaataaccgtttgttcaaagcctctattttggaaaatgtccgggcctcccgcccggaagcgacaagagagcaggtgatggccgcgctaatggctgcccagtgcaaggatattcttgacaaactgccggatggccttgatacacagatcggcaccgaaggaacttatctttccggtggtgaacaacagcgcatcgcactggccagagccattttgaaggatgcccccattgtggtgcttgacgaagcaactgcttttgccgatcctgagaatgaggtgctgattcagaaggcctttgccacactgacgaaaggccgcactgttattatgattgcacaccgtctatccactgttgtgggcgctgataagattatcattcttgaagaagggcacattgtcgagcagggtactcatgcggagctgactgcttcgggcggtctgtatgcccggatgtggaccgactataacaaggcagttcagtggaaaatcaccagcgaaaaggaggcagagtaaatgtttggagagaagtttcagcgaaaatatgccctgaccgatcagggtgtccggaacacaaagaaaggcacattctggacagtgatcgtgaatctggttgttatgggcggtgtcagcattctgtatctggtaatgtctggttttatgggagccttgacagaaggaagtcctcttcccggttcagcgattgtcctcggactgttggttctctttgccctcctgtccttcgtgacccatttgcagcaatacaaagctacctatgggctggtatataatgaggtcaaaaccacacgtctcagtctggcggaacggcttcgtaaactgccgctggggtattttggcaagcgggacttggcagacttgaccgagactatcatgggagacgtgaatcggatggaacatgtctggtctcatgtgctagggtatctgtacggtgcttacatctctacggcgattatcgctgtgtgcctgcttgtttacgactggcggttggctattgcttgcctgtggggtgtaccggtagcctttggcctgctgtttggtagccgcaagattgccgcccgcaatgcagaacggacgaaaaaagctgctgtccgggtgtcagatggtattcaggaagcattagaaaatgttagagagattcgtgccacaaaccaggaggaacggtatctaaacggactgaatcagaaaattgacgaacatgaacgagttacgattcagggtgaactgggaaccggcctttttgtaaatgccgccagtgttatcatgcggctgggcgtggcaacgaccattcttgtgggggcgaatctgatcctgtccggcagcattgatttcatgcttttgttcctgtttctattggtcattactcgtgtctatgccccattcgaccaaagcttggcactcattgcagaaatgtttgtttctcaggtgtctgctgaccgtatgaatgaaatttatgacacgcctacagcagagggcgcggagaaatttgagccaaaggggcatgatattgtctttgagcatgtgggcttttcctatgatgagaaagaagtcctgcatgatgtaagctttactgctaaagagggcgaagttacggcactggtaggcccttccggttccggcaaaagcacctgtgcccggcttgctgcaaggctgtgggacatttccaaaggagtgattcgtgtaggtggtgtggatatttctaccatagacccagaggtactgctgcgggattattctatggtgtttcaggatgtggtgctgttcgacgataccgtgatggaaaatatccgtcttggtaagcgtggcgcaacggatgaagaagtgcgggctgcggccaaagcggccaactgcgatgagtttgttcatcggcttccccagggctacaacacccccatcggagaaaacggggcgaagctttccggcggtgaacggcagcgtatttctattgcaagagctttgttgaaagacgcacccatcgtcctccttgacgaggcaactgccagtctggatgtggaaaatgaaacaagggttcaaggggcactctcccgcctgctggtcggaaagaccgtattggtgatcgctcaccggatgcgtactgtggaggcagccgataaaattattgttctagcagatggcagggtggcggaagaaggaacgccggcagaactgatgaacaaaaacggtctttaccaccgtatggtggatctacaacgacaaagcgccgggtggcgattaaattaagcgatttagcctgagagttctttaaaagttctctcaggctttttgtatataagaaagcttaaggttcaaaaaaacaggtacgctatgaaagataaatttctttgatagtgacctgtttttttaattcatcacttgacattgtggcaaagagctgatgagccaggacgagctggcagttatggatggcggcaagtgcatcttgcagttgcgcggtgtgcgtccgtttctttcagacaagtatgacattaccagacaccctaatttcaaatacacagctgatgcagacaagcgaaatacctttgatattgaagcatttttgtctgccagactaaaactcaagcctgatgaggtctgcgatgtatatgaagtagacacggagggcgtgtaatacggttccgctgagaaaggagtgatcgtatctatttgccgcaactgcctcagttgaggccattggcgtacaaagcggacaatcgcaagaaaaataatgaaaaaggaggacagccggaatcatgcccccggaaaccgggcggcagattgttccggcttttgtatgcctatgaaacatgacaaacctattttttaatcagattccggctaacaaactatatggcattttttgaacaggcaattaccgttcttcagactctcgttatcgctctgggtgctggtcttggtatctggggtgtcatcaacctgttggaaggttacggcaacgacaaccctggcgccaaatctcagggcatgaagcagcttatggccggtgctggtgtagccgttgttggtatggttcttgtacctctgctctctgggctgttctctgtctaagcgttcctgcatgaaatccttgccgctcccgcagctctgcgggggcggcggaaaggaggttgacaccgtatggatttcttacttgaagccctgacgaattggctgaaagaaatgctggtgggcggtattatgagcaacctttcggggatgtttgacagtgtaaaccaacaggtcgcggatatatccgtacaggtaggacagaccccacagggatggaatagcagtattttcaatatgattgagaatctgtcaaactccatcatggtgccgattgcaggtgtgatcctggctatcgtgatgaccgtagacctgatccagatgattgcagacaagaacaacctgcatgatgtggatacctggatgattttcaagtgggtgttcaaatcagctgccgctatcctcattgtcacaaacacatggaatatcgtgatgggcgtctttgatatggcgcagagcgtggtggcgcaggcggcagggattatcaattcggatgcgtccattgacatttcctcagttatgaccgatctggaaccgagactgatggaaatggatttgggaccgctgttcggcctgtggttccaatccctctttattggcattaccatgtgggcgttatatatctgtatctttatcgttatttatggccgtatgatcgagatctaccttgtgacttcggtggctcccgttccaatggctgccatgatgggcaaagaatggggcggtatgggacagaattacctccgatccctgctggcactgggctttcaagcgtttctcattatcgtctgcgtggcaatttatgctgtgctggtgcagaacatcgctctggaagatgacatcatcatggcaatctggagctgcgtgggctacaccgtactgctatgttttacgctgttcaaaaccggcagtctcgccaaatcagtctttcaggcgcactaaaacggaaggaggtttccacattggcttatgtacccgtacccaaggacttaacaaaagtcaaaacaaaggtcatgttcaatctgaccaagcggcagcttatctgctttacgggcggagcgcttattggcgtaccgcttttctttttgctcagaaaacctaccggaaacagtgtagcggctatgtgtatgatgctggttatgctgcccttctttatgctggctatgtacgaaaagcatggacagcccctggaaaagatcgtgggcaacattctcaaagtagctgtgatccgtcccaagcagcgtccctaccagaccaataacttttatgccgtattaaagcggcaggaaatgctcgataaggaggtgtatgacattgttcaccgcaataaaaaaatggctgcatcggatgttcggaaaaaccgaggaaaaaactgtgcagccggtaaagacaaagaaaaagctgtcccgcgccgataagaagcagatcgaagcggccattgtccgcgccaaccgcacggacaaaaaaggaaaatctgcgcaggacagtatcccttatgaacggatgtggccggacggaatctgccgcgtatcggacagccactacacaaagaccatccagtttcaggacatcaactatcagctctcccaaaacgaagataagacggcaatctttgaggggtggtgtgatttcctcaattattttgacagctcgattcatttccagctgtcttttttgaaccttgcggcatcggaggagacctttgctaactccatttccatcccgccccagagggacgcctttgacagtatccgcgaggaatacaccacaatgctgcaaaatcagctggccagaggtaacaacggtctcatcaagaccaaatatctgacctttggtatcgacgcagacagcatcaaagccgccaagccccgtctggagcgtattgagaccgatatactcaacaacttcaagcgtcttggtgtagctgccagaacgctggacggtaaagaaaggctttctcagcttcatgcggtattccacatggatgaacagctcccgtttcagtttgaatgggactggctggctccttccggtctgtccacaaaggattttattgcaccaagctcctttgggttccgcaccggcaagcagttccgtatgggcaagaaatacggggctgtttcttttttgcagattctcgcaccggagctgaatgaccgtctgttggctgattttctggatatggaaagctcgctcattgtgagtatgcacattcagtcggtggatcaggtgaaagccatcaaaacggtaaagcgcaagattaccgaccttgaccgcagtaagatcgaggaacagaaaaaagcagttcgtgccggatacgacatggacatcattccatctgaccttgctacttacggcagtgaagcgaaaaaactcttgcaggatttgcagagccgcaacgagagaatgttccttttgacctttctggtgctgaacacagcggacaatccccgtcagcttggcaacaacattttccaggcaggctccattgcccagaagtataactgtcagctgaccaggttggacttccagcaagaagaagggctgatgagctgtctgcccctgggactcaatcagattgagatccagcgaggactgaccaccagttctacggctatctttgtaccgttcaccacacaggaattattccagaacggcaaagaggctctgtactacggcatcaacgccctgtccaacaacctcatcatggtggatcgaaagctgctgaaaaaccccaacggcttgattttgggtacgccgggttccggtaagtccttcagcgcaaaacgagaaatcgccaactgctttttgcttaccagtgatgatgtcattatctgtgacccggaagcggagtacgcacctcttgttgagcgtctgcatgggcaggtcatcaagatttcgcctacctctgccaactacatcaatccgatggacctgaacctggactactcggatgatgaaagcccactgtccctcaaatctgattttatcctcagcttgtgtgagctgatcgtgggcggtaaggagggcttacagccggtgcagaaaaccatcattgaccgctgtgtgcgtctggtctatcagacctatctcaatgacccgcgcccggagaatatgcccatactggaggatctgtataacctgcttcgggaacaggaggaaaaggaagcccagtatatcgctacggctcttgaaatctatgtaaccggctccctcaatgtgttcaaccaccagagcaatgtggacatcaacaaccgcattgtctgctatgacatcaaggaactgggcaagcagcttaaaaaaatcggtatgctggtggtacaggatcaggtgtggaaccgcgttaccattaaccgcgctgcccacaagtctacccgttactacatcgacgagatgcacttgcttttgaaggaggaacagaccgctgcctatacggtggaaatctggaagcgattccgtaaatggggcggtattccgacaggtattacccagaatgtcaaagaccttttgagcagccgcgaggtagagaacatctttgaaaactccgacttcgtgtatatgctcaaccaggcaggtggagaccgccagattctcgccaagcagctgggcatttccacgcaccagcttagctatgtgacccactccggtgagggtgagggcctgctgttctatggctccacgatcctgccgtttgtagaccacttcccgaagaacaccgaactttaccgcattatgaccaccaaacctcaagaattgaaaaaggaggatgaatgattatgaaccccaacattttgaataaaaacccgctgatgttttttgacagggcggtaaatgcccagcgcagccagctgcttacggtcatggccgatgcggtaagtgagtgccgcacggcggcagatcaggcagccgaactgaatgagaccggtcaggtggggcttctccgtctggcagaggtctggagcgtcattcgtgctaaagaaggtatgggcggcctgattctgaaaggaacagaggcgaagatcctgtccgatgtggtggcacagttttatgcctacctgtccggctgtatgttcaacgatcctgtgggaatggccgtttatgcagagctgcactacatgatgtcctccctcatgctgggagaatggtttgaataaagagccgcgcctgcgctttactgatgaggaacggtctgatcctgcactggaaaagccgatccgtaaagcggagaaagctgcggccagagcagataaggcgcaggccaatatcccaaagaaaaaggtcaggcagacggtcatcgacccggataccggaaaaaagacctcgaagctgacctttgaggacaagaaaaagccaccctccaaactttctcaaggggtcaaggaagctcccgtccatctggttgcgggcaagctccacaaagagatccgggaaacagaacaggacaatgtgggcgtggaaagcgcccacaagtccgaggaagcggtggagaccggcgcttatctggtgcgggagggctatcgcagccacaagctgaagccgtaccgcaaagcagcacaggcagagcgccaactggaaaaggcaaatgtaaatgttctgtaccagaaatctttgcaggaaaatccccagtttgccagcaatccactttcccgctggcagcaaaagcaggccatcaaaaagcagtatgccgccgccaaacatgccggtcagactgctggaaatactgcccaggctgcatccaaaacaggaaaagccgcaaggacggtaaaagaaaaggcacagcaggcaggggcattcgtcatgcgccacaagaagggtttcctgatggcaggggttttgttcctcattacctgtatgctgatgaataccatgtcctcctgctccatgatggcgcagagcatcggttccgttctctccggtaccacttatccgtcggatgacccggaaatgctggcagtggaggcagattatgcagccagagaagcccagttgcaggaggaaatcgacaacatagaaagcagtcacccagggtatgacgagtatcgctatgaccttggtatgatcggccatgaccctcatgagctggcagcatttctctctgccgtcttgcaaggctacacccggcagagcgctcaggcagagctggcgcgtgtgtttgcagcacagtatcagctgacgcttactgaggaagtggagattcgctaccgcacggagacctccaccgacccggagaccggtgagaccacctcagaagaagttccctatgagtattacattttgaatgtgaaactcgccagcaagcccatttccgctgtggtgtcggagcttctgaccccggagcagatgaaaatgtatcaggtttaccggcagaccatgggcaataagccgctgttgtttggcggcggctcccctgataccagcggctcggaagatctgtccggtgtgcagttcattaacggtacccgccccggcaatcctcagctggtggaactggccaagcgtcaggtgggcaatgtgggcggttatccctactggagctggtacggctttgactcccgtgtggaatggtgtgcctgcttcgtatcctggtgctataaccaggcaggaaaaagtgaaccgcgctttgcaggctgtgagtggcagggcgttccgtggttccagtctcatggacaatggggtgcaagaggctataacaatctggctcccggagatgcaattttctttgactgggatttggatgggacagcagaccatgtaggtatcgtgatcggtacggatggcagccgtgtttataccgtggagggaaattccggcgatgcctgcaagattaaaagttatgacctgaattatcaaagcattaagggctacggcctgatgaactggtaacagagatttttaagaaggagtgatagacgatggcaaagaacaaaattgagcgcattgaccaggagattacaaaggtccgcgagaagatcgcagagtatcaggaaaagctcaaggcgctggaagcacagaaaaccgaggcagaaaatctggagatcgtccagatggtgcgcgccctgcgtatgaccccgacccagttgagcgccatgctgtccggtggcacagttcccggcagtttggctgatgacaataacgaacaggaggaaaacagctatgaggaataaacgattgctccgaacactttccgccctttgcctgacaatggttgtggcatttggctttacgatccctgcttttgcacaggggtcagaacaggctccggcggcaccggcagaggattctaccaatgacagcaatgttactgtggaagaaacagaaccagcaccggcacttacaccggaggggaatgcggcactggtggatgattttggaggcaataagcagcttattactgttacgaccaaagctggaaattacttttacatcctgattgacagggcgaatgaggataaaaagactgctgttcactttctgaatcaggtggatgaagcggatttgatggcactgatggaagatggaaaagcaaaagaggagccgcctgcggtatgcagctgcacggcaaaatgtgaagcaggggcagtcaatacggcctgcccggtctgtgtaactgataagagtaaatgtacgggcaaagcaccggaacctccggcagaaacaccggagccggaaaaagagaagcctgccggactgaacccggctgcgatagtccttttgctggctctgctgggcggctgtggcgtatttgcctatttgaagcttgttaagaacaagcctaagaccaagggcaatgacagtctggacgattatgattatggcgaggaagattccgaggaatgggaaaccgaggatgaggagtcggacgaaccggacgctgatgggggcagcacagaagaagatgatgaggacagtgtgaaatgacccgtttcacagacagtccctatgaacgcatgatgacacgcaggccggagggcgggaaggaaacttcccgtcctccttctttaccccacagccacccctgctatggctgcgggaattatggaagtccctgcgtaggtatctgccatcgtgagatggaacgctggctcaaagaaaggaaacgaaaaaaatgagtgttctgattatatttatcaagctgattgctgtttttgacctgctggtgatcgccgtgtattttggcggcgacattctttctaccatgttaaacaaacttcggagaaagccaaagcaagatgacccctttgatttctccttagataccgtgacagtttcattgtccatagattctatccgtcagctttgttccgacgatgcggcagattttgtggaagaaaagatcctgccaaatgcggagaaaacaatggccgtgctgacggaacaagaacagacggcggctcggctgctcttatccgctttgattggttttcttgcagcagaagctcctatggatgaacagagctttcctttgatgatggaacttctgaactgcatggaaggggaaaaagaagatggttgtcaggatgcagtagatagtttacttgaagatgccgcctgcaatacccgccgtcacgaagaatattacagcaattatcaacgctaccagctgatgcaggtggataaaacccgtgtcattttggcttgccgtatcatcatcaatgacctgctggggaaactgtaccgctatgactaccggtttggttataacctgctactggatgaggaaaacagcatagagaaaaaactgcacacgcctgtgcgggaagaatgggaggctgaagatgatgagatataaactggtaatcgctgaaaaaccatcggttgcacaaagtctggctgcggtaatcggtgcaactgctcgtaaggacgggtatctggagggtaacggctggcgtgtcagctggtgcgtgggccatctggccggtcttgcggatgcagacagttatgatcccaagtatgccaagtggcgatatgatgacctgcctattctgccggaacattggcagatggtggtgggaaaagataagaaaaagcagtttgatattctcaaaaagctgatgaatgccccggatgtgacggaggtggtaaatgcctgcgatgccggacgcgagggcgagatgatcttccgcagcgtctacgagctggcaggttgccaaaagccgatgaaaaggctctggatttcttcgatggaggactccgccataagggagggctttgcaaacctgcgccccggtgcggactatgatgaacttcgggatgctgccctctgccgtgccaaggccgactggctggtggggatcaatgcgacaaggcttttttccgtgctgtatcaccgaaccctcaacatcgggcgcgtgatgtccccgacgctggcgcttattgttcagcgagaagctgagatcgacacctttcagccgattcccttttataccgtggcgctggagctgcccggtcttaccgtatccggggagcgcatggcggataaggccgctgccgagcagctgaaagaaacctgtcagggtgtaaatgtcacaatcaaaaaggtggagtgcaaggaaaagtccgaaaagccgcctgccctctatgacctgactgctctgcaaagagatgccaaccgcctgcttggatttacagcccagcagaccctggactatctgcaaagcctgtatgaaaagaagctctgcacctatcctcgtactgacagccgctatctgactggcgatatggcagacagcctgccggtgctggtgaatctggttgccaatgctatgccgtttcgcaaaggaatcgccattacctgtgatccgcagacggtaatcaacgataagaaagtaaccgaccaccacgcagtaatccctaccagaaatctcaaggatgcagacctttctgcccttcctgcgggagaaaaagcggtgctggagctggtggccctgcgtctgatgtgcgccgtagcccagccccatatctattcggaaaccgttgtgattgcagcgtgtgccggtggggagtttaccacaaaaggaaaaacagtgaagcaccccggatggaaagcactggaggacgcttatcgtgccaaaatgaaggatacagagccgaaaaaagagggcgtagagaaagccctgccggagctgaccgaaggacagacactttcggtttctgcggcaatcgtcaaagaaggcaaaagcagtcctcctcagcgctttacggaggacaccctattgtccgcgatggagactgccggaaaagaggatatgccggaggatgccgagcgaaaaggtctggggacaccggccactcgtgccggtattttggaaaagctggtatctgccggttttctggaacgaaaaaagaacaggaaaacggtgcagcttctcccttcccacgatgcagtttccctgatcaccgttctgccggaacaactgcaatcgccgcttctgactgccgagtgggagtaccgactgggcgagatcgagcgcgggcagcttgccccagaggagtttttggacgggatcagcaccatgctgaaagacctggtgggaacttatcaggtcatcaagggaactgagtacctgttcactccgccccgtgaggtggtgggcaaatgccctcgctgcggcggtgaagttgcagaactgcaaaaaggcttcttctgtcagaatgattcttgcaaatttgcaatctggaaaaataacaaatggtgggctgccaagaaaaaacagccgaccaaggctgtggtgtctgcactgcttaacgatggccgtgtccgtgtgacgggcctatattcggagaaaaccggaaagacctacgatgccgctgtggttttggaggacgatggacagtatgccaacttcaagctggaatttgaccagcggaaaggaggcagccgatgaagctctctttagtggaacgggaaaccattctcctctataaccaggcagaaccaatggctgaggtctacacccacgatccccgtctgatggagaagctggaactgctggcaaaaaagcaccccgaccagatcacccgaaaggacgcccataactttaccgtccccaagcggtgtgtatcagtccgggagccatacagcgccgagcgtcgcaaagctgccagtgagcgtgcgaaagccgccggataccagccccctgtgaaaaagtccggcagttaaaggcacatggcagagaatgtatttgaagcggtcaagcagtcggtcagcaccagagaagcggcagagttttatgggataaaagtcaggcgaaatggcatggcctgctgtccttttcacgatgataagaaccccagcatgaaggtagaccagcgattccactgctttggctgcggtgaagatggggatgtgatcgactttaccgcaaagctctttgacctctcctcaaaagaagcggcggagaaactggcacaggactttggcctgatctatgacagtcaggcccctccccgcaggagatatgtccggcaaaaaaccgaggcacagaagtttcgggaggatcgacagcgctgttaccgcgtactgtccgattactatcatctgctgaaaaaatgggggattgaccattctccccggacaccggaggaagaaccgcacccccgctttgtggaagcgatccagaagaaaacctatgtagagtacctgttggacctttttctttatgaaagtgaagaagaacaaagggcatgggttgcagaacacacagcagaaatcacacacttggaaaggagattgaaaatcatggctgagaacaaacccaccaaccgagagcggctaagggaaatcacagatggcatcgagcaggggatcaaggaactgtttgagagtgaaaagtatatgcgctatctgtccgtcatgtcccgcttccaccgctattcggtaaacaacaccatgctcatctatatgcagaagccggacgctacattggtagccggatacaataagtggaaagaccagtttgagcgtcatgtaaaaaagggcgagcatggcattaccatcatcgcccccacaccgtataagaagaaaatcgaggagcagaagctggacccggataccaaggctccgattctggataaagacggaaagatcgtcacagaggaaaaagaaatcgaaatccccatgtttcgtccggtcaaggtctttgatgtgagccagaccgacgggaaacctttgccggagcttgcttcctccctttccggcaatgtgccaaattatgaggcattcatggaggctctgcgccgcagtgcgccggtgccgatcacttttgaagcaatggccgccgatacggacggctatttttctgccgatcatcagaaaatcgccatttgtcagggcatgagtgaggtgcagacggtttcggccacagtacacgagattgcccacagcaagctccacaatcagaaaaagattcagattgccaatgacgagcaatatcaggagatcgagctgtttgataaacccggtctgttctccaatgggcggattgcccgtgataatctgccagagggcgtttattgctatgacctgcgcggttctgactacgaccccggagagccggtctgtgtagaagaacaagtagttgtaaaccatgcaggttccgttctgctgacagagccgctggagttggcggaagatggacgcctgatgctgaccgaggaagaagggctgaattttgttggcggcttttctaccctcacccagtttttgcaagaacagaggaaagaccgccacacggaggaagtggaggctgaaagcatctcctacgcagtctgcaaatattttggcatcgagaccggagaaaacagcttcggctatattgcaagctggagtcagggcaaggagctgaaagagctgagaaccagtttggaaaccatcaacaagacctccggtactttgatctctgacattgagcgccactataaggaaatctgcaaagagcgtgggattgacccccttgcaaaggcagagccggaaaccgccccgatagagcagccagaagatgccgctaaggtagccgatagacagccgaccggcaatctgacctactatgtagcagagtgcatggagtttccaaacctcggagaataccacgataatctgtctttggaagaagctgtccgcatttatcaggagattccggcagagcgaatgaacgggatcaagggcattggcttcgagctgaaagatggaagcgactatgaaggatcttttccgattttgaccgggcagaccattgacctggacaccattcaggcaatcgactattaccgtgataatccgttggtgcaaaaagcggtaaaggaactggctgcggccatgccggaaatggaagtgctgggggcggatgccaaccagcaggaggctttatttctgatcgacaatgccacctatcttcatatccagtcctgtgacagcggctgggactataccctttacgatgccgcatccatgaaagagctggatggtggtcagctggatatgtcggagatttcccgcatgaaggcagttctccagatttgtgatgacaacgatttgggcagagactcggtaaaatacgcaccgttgtccatgattgagaccttgcaggaagctgcctaccagcagatgcaggcagaggccagtcagatggctgcttcttctcagctgccggaagcacaagagcaggcgctggatgaataccccatgcctgatgagcaggtctccacaccggatatgcaggaatacggctacttctatgatgggatgctccctgtcaccagagaacgggcgctggaactggatgccgctggtttgactgtctatgtgctgcatgaggacaatacggagagcatggtgtttgacccgcaggaaatcatggatcatggcggtctttttggcgtggaccgtgaggaatgggagaaaagccctcagttccacgaaaaggtcatggagcgtcaggaacatcagcaggaacgcgaacaggcatttctatcccagaacagagattgctttgccatctatcaggtgagccgtgacgatccgcagaatgtgcgctttatgaatctggattggttaaagtcccatgacatttccatagaccgcagcaattatgatctcatttacactgctccgctgagggagtctggcacggtaccggagcagctggaaaaactatatgagcagtttaatctgcaaaaaccggcggattttcacagtccttctatgagtgtcagtgacatcgttgcgatcaagcaggatggtaaggtatcctgtcattactgtgacagtgttggttttacccagatccccggattcctgccggaaaatccgctgaaaaatgcggagatggccgtggaggacgattacggcatgatcgacggtatcatcaacaatggcgcaaaagagcctacggtggcagagctggaacagcaggcccgcagcggtcagcccatttccctgatggatctggctgccgctgcccatcgggaggaacgggaaaagaaaaagtccgtcatggagcagctgaaaagccagcccaaggcagaacacaaaaagatagcgccaaaaaagagtgcggaaagggagatttgatatgggaaactttacttttgaggaaatgaacctgatgtgcatttacaataccggcagccgcaccggactgatcgacagcctgcgtgagatgcgcggcgagctggccccggaggaaaccgagctgcgggagttgacagacagcgcactgggcaagctccagaccatgagtgatgccgagtttgcccagctggagctgtatccggattttgaacagtaaacaccataatcgcagggatggggtggcaatatgccaccccacctctttaccccaaaactgaaaggagcacagaacactatgccaaccaaagctgaactatatgcacagatggcggaaaaggtggcaacgcagctcacggggagctggcaggaatgggcagggtttctcaccactgcttcccgcctttacaagtacccgttccatgagcagttgatgatctacgcccagcgtccggacgctaccgcctgtgcagagtacgatttgtggaatgaaaagatgggccggtatgtaaggcgcggctccaagggaatcgctctggtggacgattccggggacaggccccgcctgcgctatgtttttgatatttccgacaccggaacccgtgaacattcccgcactccctggctgtggcagctggaggagcgccatttggattcggtgcaggccatgcttgagcgcacctatgatgtttccggtgatgaccttgccggacagctcaccgaggtagccggaaaactggctgaggaatactggacggagcatcagcaggacttcttctatatcgttgacggttcctttttggaggaatatgatgagtttaacatcggagtacagttcaaggcagcagccaccgtcagtatcacttacgctttgatgtcccgctgcggactggagccggaacgctacttcgaccacgaagatttcatggcaatctttgatttcaacaccccgtccaccatcggggcgctgggaacagcggtcagccagatcaaccagcaggtgctgcggcagatcggcgttaccgtccgaaatgcagagcgcgaagccaaccaagaaaggagcaaacaagatgaacaatcccatgacctatatccagaacggagactatctgattcccgacctgaagctgagccagcagccggagaaacccctgggcaagtacggcaggatgaggaaaacctacctgaaggaacatcgtcccatcctctacaaccagatgttgctgagcgagaagctgtacccgcaccttctggagatcgacgagaccgcccagagcagactggagcagatgatgccccagctggcgaaggaagcgggagccaccgaggaactgaaagccagcgatcccatgaagtgggtggggctgatgaacacctgcaaagcccaggcggaggagatcctgatggcggagcttatcaacagctgaccctaaacctgttcctctccgaagcggaacagatccaatccatagatgaagcagagaatgtagcgcatacatcctctgctttttcttttgcccaaaatgacatcgaccatgtgctgcgtttgggcggcaatacagaccgtcaaagggagcgtgtggttgcagcctttgaaaagcagaaaaccaccgctgagattgccgagatactgaaaacgctgtaccacggcggcaatggccttggcagtgtgagcgcatggtatgccgaggatggtatccatctttcacatgggaagtctgtccgttatgacaggtctgcccaggtcatttcctgggagagcgccgcagagcgtatcggggagcttttggagagcggccagtttgcctccaatgtggagcttgcagaagcggcaggctatgaacgcttcctcctttcagaaaagctctggtatctgtaccacgatttcagcgaggaagccagagaagccggatatttgtcctgcctgtcagagatcaaaggcaatggtttcccagaggagacccgccgcctgacggagcagctgagtgacccggctttccgccagaccctcaaggaagaatacgccgccttctggactgcctatcagcaggaccgtgacctgttgcgttttcgctatcatagaccgagggaaatctgggagaacctgaaggaccttgacctgccccgcaggaccttttcttcagagctttcccaagtgccaaccgtccagcactttattaccgaggatgagatcgacgccgccatgaccggcggaagcagtttcgccggaggaaaaggccgtatctatgcgttcttcatggaaaaccatacggataaggagaaagtaagattcctcaaagatgagtatggcattggcggacgctctcatgccttgtccggcgcaacacacagcggcgaagatcacgatggaaaaggactgcactataaaaagcaggactgcccggatgttcacttgaactgggaaaaggttgccaagcgcattacctccaagcccagcagccggagatggaggaagaaacgccaaagcctacccttcgggagcagtttgagcagtataagactgtggtgactgccgccatttccgaggatgccgcataccgcaatgcctgcgggcattctgaccgtgaaaatgctgtcatcgagggcaatgccgctgtgcgccgtgcagtccttggttctaaggatatggagctgatccgactctattcggatgtgccggagttccgtcagcgtttacaccgggaagtgatcgacgagacctatccaaagctccatgagcttcggcgccctctttctcaggaagatattgatactgccctttgtgcatggaacggcaatatcgagagtaaacacgctgttgtccgctatatgaaagaccatgcaagagaaaaagataccgccgcatggctggctcaggaatacggcggcagtaacagcaacagcctgttcgttgtccgtgccggcagcccggaggaaacgcagatgccctggccgaaggtacagcgcaggcttgcccagctcattcaggaggaccggttctataccgaagaagaacaggaccgttttgacaacatcgaccccatcgccatccgggaagccctggaggaaagagggattgtcaacggacaggtggcagacccggaaaaactggacaatgacccgtttatccaacaggtggtgtcggatgtagagcagatcgcagctgccgagatagagcagccttccgaagtttccatttccgatgaggaatatgacgcagttcgccgcccaattccgcaaagaacctcctatgacccagccgccccggtctatgccgtgggcgataccgtgtatatcgaggatgacgcctatcagatcaccgagctgcgggaggacaccgtacagcttctgcccaccgggatggtatatcccatctaccgggcagagcgcaaagaacagtttgagcagctgcttcgggcagaccgccgcaatgcttactataccgagtttcttcctactgacccggacaaggcagatcaggacttgcgggatgtattggctcatggactgatgtatgaagcggataaaaagcagatttccacgctgctgcaatccggcaggagcaacagcgagatcgcctattggctgagcagagcctattccggtgagatcgagacactgaatctggagaccggcgatattgccgattaccgtaccacggcacagggcatagaactggaagtcatggatgcagaggaaaagcgtctggctatgctgtatttccgctgggatgaggttgcgtctttgctgcgcgggatgtatgcccgtcagcaggacggttttggacaggaacagccccaaccggctaccgaatccccgaccttccattccgagaccatggccgtctatccgggcgataagaacaatctgccttatgatgtggtggtggaacgactgcatatcgaggagccggagccaccagcgcctgtgacagagccggagaaaacctttgaggaagtgctggacgaacacccggtttccattcaggtcaatggccagtggcagaccttccccaatgccagagccgccgaggaagccgcttacggggaatacaaggacaacctgcgccgcaccgctgagaatttccgtatcaccgacgaccacctgggcgaaggcggtccgaaagccaagtttcaggccaatatcgcggcaatcaagctgctgaaatatctggaagaaaccactgaacaggcaacgccggaacaacaggaaatcctatcccggtatgtgggctggggcggtcttgccgacgcctttgacccggagaagcccgcatgggctgcggaatatacccagctgaaagcgctgctgaccccggaggaatacgctgccgccagaggttccaccctcaacgcgcactacaccagcccaacggtcatcaaagcgatttacgaggccgtgggtcgcatgggatttgagaccggaaatattctggagccgtctatgggtgtgggcaatttctttggtatgctgccggagaaaatgcgaaacagccatctgtacggcgtggagctggaccctgtttccgggcgcatcgcaaagcagctctatcccaaggcggacatcacagtaggcggctttgagaccaccgataggcgtgacttctttgaccttgccatcggcaatgtacctttcggtcagtatcaggtcaacgacaaagcctacaacaagctgaatttcagtattcataactatttttttgccaaagcactggatcaggtgcgtcccggcggtgtggtagcttttgtgacctctcgatataccatggacgccaaggattccaccgtgcgccgctatcttgcccagcgtgccgagctgctgggagctatccgtctgcctaatgacgcgttcaaaaagaatgccggtgccgaggtggtatcggacatcatcttcctccaaaagcgggaccgcccgttggacatcgtgccggaatggacccagaccggacagacggaggacgggtttgccatcaaccggtattttatcgaccacccagaaatggtgctgggcagacaggagccggtaagcactgctcatggtatggactacaccgtgaaccctatcgagggactggagctttccgaccagctgcatgatgctgtgaagtacattcatggcacttatcaggaggcagagctgccggagctgggcgaaggcgaagctattgacacctccattcctgccgaccccaatgtgaagaactattcctatgccattgtagacgggcaggtgtactaccgggaaaacagccgtatggtgcgccctgacctcaacgccaccgccgaagcccgtgtaaaaggtcttgtgggactgcgtgattgtgtgcaggaactgatcgaccttcagatggatgcagcggttccggacagcaccattcgggagaagcaggcggaactgaaccggctctatgacagtttttctgccaaatacggtctcatcaatgaccgtgcaaaccgcctggcctatgcagatgattcttcctattacctgctctgtgcgctggaagttattgacgaggacggaaagctggagcgcaaggcggatatgttcaccaaacggaccatcaagccccatcaggcggtggctgtggtggatacggcaagcgaagcactggcggtgtccatctcggaaaaagcctgcgtggatatggactatatgagccagcttaccggaaaaacaaaagaagcactggccggagaactgcaaggcgtgatcttccgtgtaccgggacagttggagcaggacggaacgccccattatgtgactgctgatgaatacctctccggcaatgtacgccgcaaactgcgtcaggcgcagcgggccgcacagcaggacccggtttatgcagtcaatgtggaagctcttaccgccgcccagcccaaagacctggatgcgtcggagattgaggtgcgtctgggcgctacctggattgacaaggaatatatccagcagtttatgtatgagaccttcaacaccccgttttatctccagcgcagtatcgaggtcaactattcgtcctttaccgctgaatggcagatcaaggggaaatcttctgtatcctacaacgatgtggcagcttataccacctatgggaccagtcgtgccaatgcctacaagattttagaggacagcctgaacctgcgggatgtccgcatctatgacaccatagaggacgcagacggaaaagagcgccgcgtactgaacgccaaggagaccaccctggcggctcaaaaacagcaggcgatccgggaagcctttagggactggatctggagagacccggagcgccgccagactttggtgcgccagtacaacgaagaaatgaactctacccgtccccgcgaatatgatggcagccacatcacttttgggggcatgaacccggccattaccctgcgggaacaccagaaaagcgccattgcccatgtgctgtatggaggaaataccctgctggcacacgaagtaggcgcgggcaaaacctttgagatggtggccgctgcgatggaagccaaacgcctgggcttgtgccagaaatctctctttgtggttcccaaccacctgactgagcagtgggcatcggagtttctgcgcctctatccttctgccaacatcttagtcacaaccaaaaaggactttgagacccataaccgcaagaagttctgcgcccgtattgcgaccggtgactacgacgccatcatcatgggacacagtcagtttgagcgtatccccatcagccgggagcgtcaggaacggcttctctatgaacagatcgacgagatcactgaggggattgcagaggtacaggcaagtggcggcgagcgttttaccgtcaagcagctggagcgtaccagaaagtctctggaagccagactggaaaagctgcaagccgaggggcgaaaagacgatgtggtaaccttcgagcagctgggtgtggaccgtttgtttgtggacgaggcccacaactataaaaacctgtttctatacacaaaaatgcggaatgtggctggtctttccacatcggacgcgcagaaatcctccgatatgtttgccaagtgccgctatatggatgagatcaccggaaactgtggcgtgatttttgccaccggcaccccggtcagcaactccatgaccgagctttacaccatgcagcgttaccttcagtatgaacgcctgcaagaactgaacatgacccacttcgactgctgggcttcccgatttggggagaccgtcacagcattggagctggcaccggagggaaccggctaccgggcaagaacaaggttttccaagttctttaacctgccggagctgatgaacctgttcaaagaagtggcggacatcaagactgccgaccaactgaacctgcccaccccggaggtggaataccacaacatcgtggcgcagcctaccgaacatcagcaggaaatggtcaagactctttcggaacgggcatcgctggtacacagcggaaccgttgacccgtcccaggacaatatgctcaagattacctcggatggccgtaagctgggcctggaccagaggatcgtcaaccagatgctgccggatgaacctggcacaaaggtcaatcagtgcgtggacaacatcatgcagatctggcgggacggcaaagctgacaagctgacccagctggtgttctgcgacatttctacaccgcaggcaaaagctcctgcaagcaaggcggcgaaaacgctggataatccactgcttcatgcactggaaggcgccgtgcctctgccggagcaggaaccggcctttacggtatatgatgatattcgtcagaaactcattgcccatgggatgcctgccgaccagatcgcttttatccatgaagccaataccgaagtgcggaaaaaggagctgttctctaaagtccgtaccggtcaggttcgtgtccttttgggcagcaccgccaagatgggcgcaggcaccaatgtgcaggaccgtctggtggcacttcatgacctggactgtccgtggagaccgggagaccttgcccagcgcaagggccgtatcgagcgtcagggtaaccaaaatcctcttgtccatgtgtaccgctatgtgaccgaaggaacctttgacgcatacctctggcagacggtggagaataagcaaaaattcatcagtcagatcatgacttctaaatcaccagtgcgttcctgcgatgatgtggacgaaacggcgctttcctttgccgagatcaaagccctgtgcgccggagatccccgcatcaaggagcgtatggatttggatgtggaggtatcccgcctgaagctgatgaaagccgaccaccagagcaagcaatatcgtctggaggaccagctgctcaaatacttcccggaggagattgaaaagcacaaaggctttatcaagggctttgaatccgatctggaggttttggcagcgcacccgcacccggaggacggttttgctggtatggaaatccgcggcgatctgctgaccgataaggagaacgccggtgcagcccttttggatgcctgcaaggaggtcaaaacctccgatccggtgcagatcggcagctaccggggctatgccatatccgtggaattttccgcttggaaacaggagtatacgctcctgctgaaaggacagatgacccaccgggcaacccttggtacagaccctcgcggaaatcttacccgtatcgacaatgccctcgcccagatgacccagcgtctggaggcggcaaaggcccagctggataacctctatcagcagcaggctgcggcaaaggaggaagtcggaaagccattcctttatgaagaagaactgagaagcaaaaacgcccgtctggtggagctggataccctgctcaacatcgacggaaaggggcaggcacataccgagtctgttgttaccaaaagcacacggacttcggtgctggataacctaaaacgcccggtgcaaccccgcagtacagacaagaaaccaaaacagcatgaggaggtgcgataacatgaatactaacgatctgaatacagccctttatgaaaagatggctgccgaacaggataagttccgggactggctgaaaagccagcccccggaagaaatcctgcaccacacctatgaatatactgtccgtgaggatattgtgatggcgatggaggagctggagctgaccgacgcccaggccaaggcacttttggaatctccctctccattggcggatgtgtaccgctattttgaaaagctggagaccggctatatggatgtgatccgggacagtattgagaaccgtgccgacgatgtgtgcagagctaaagaggaactgcgaacaacaccgatctatccccattcagctgcctatgcgagagaacatggggagctggagcagtaccgagcttccaacaatgtaaatcgccaatgcaaagagtctattgaagcggcggtgcgggagcacttcgacggaatgtatctcagccacgatgcggcaaagggtgtgatcgagacctatggcatggagcgtgtgtccatggttctgtctaacacggtccagcttcaggactgggatgggcgttactcccgacgcaacaaagaatgggccaagaccattcccaacaataatcccgaaatcgtccgttgtggttatgccttaaacagccaccctgctgtgctggatggttttattgatctggtgcgtgaagaacagcagcgcagccgtacccagagaaaaaaactggaaccgtcccgtccctcagtacgggataagctcaaacaggagctgcccgcccataagtctgccgccccgaaaaaacgggagccggagcgataaccatggcaaagcgcaagcgggatgtgccggttttgttttgggtgtccgcagaagaactggaactgatccatcaaaagatgcagcaatacgggacagagaatttgagcgcttatctgcggaaaatggcgctggatggttatgtggtcaagctggaactgccagagctgaaggagttggtctccctgatgcgccgaagcagcaacaacttgaaccagctgacccgcaaagtgcatgagaccgggcgggtttataatgctgacttggaggatatatcccagcggcaggaacaactgtgggagggtgtgaaggaaatccttacccaactctccaaactttcataacagggatagatactccatttgcggagggaggaacggcgtttcttcgccgcacttccctccgctttttctttttgtctgtatccttgtcttttgtctgcccgtaccggataatatgagtagaataagaagcgtagcaaaggagtgaaaacagatgctgacctttgaaaaggtgctggagatttttgcggattacctaaccgcagacgagaccatagaagtttatatcagccgccatggatgtgtaagagttgaatttgaccaagattttcactattgctctggcgaggtgtgccatactcccaaggaactgctcgacctcttagccgatgattaccggacttatctggagattgaactgaccaaaggaaaacgggaagtgacggaagatgatgagagagaagcggatgccctatgcaaacagtatctggagcgttggaaggaggaacagaaatgaagattttgaaatgcctgctgatgatcgtaactgcaccggtcattttggtgttgacgctttttgtctggctctgcacggggctgatctacatatccggtttggtgcttggtctactaagcacggtaattgctctgcttggcgtggctgtgctgattacctattccccgcagaatggtgtgattttgctggttatggcatttttgattagcccgatggggctgccgctggctgcgatctggctgctgggaaaggtgcagagtttgaaatttgcgatacaggattgggtgtatgggtaaatgatgtgaatataatttggaatgaaaaagaagcaggacaatgggagatgagacccaatgccctgcttctctgtttattcggaacgaactgtaatatatttttgattgcgacttttaggtttatcgggaatcgtcatttctaattgcccggattctaaaagcggattgatatgcttcaaagtgaagtttcttaaatctttgaagccgcaaaatactgcaagctctttcttggattttggtgttgtgcaaaaagccaaaatctgtttggacaccgttgatagttcaatatcttggtgggtaacttggtggataacttggtgggtgtcatcctctaagttgtagtttacatttttcaagatgactctgaaatctgtcgctgttgaggaaaattcgggcttatatgcctctgtgtatccaggcagcttttcagtttcactgacgattttgcgcagaccacttccacggcgttccatgtacttcatgcggtggaacaggtcagcgatcacagggtttcgtcgcatcgaacgaatactgtaaatatcgtattcctgaattgagccgccgccaaacataccgcccggagatgtgatttccacccgatcatcaaacatatcaatgtggacttcgctgccaagcacaatataatcacgatggatgagagcgttgacaagagcctctgttacagctcgttcagcataatccggcttgtctacccgatactgagcttctttgacaaaacggactttggaattattgcgaataaattcactgccgcttttcagtaaataaatcaaattcccctcgtattccttatcgtccagcgcatcatcaaagatagagcctttttccaagccattccaccgggtacagaacatacgggagttataaactgtgtgctgatcggtcatgagctttccggcattggtcaggaacccatttttgtcagccaaaccgaatgagacataatcggatggctcaaagcggagaccggtccgttccagataggttgcttccagaagtgtaaagctgtaatccttttttaccgcgtctgttgttagggtatcaaaggactgattggttccctttaagatcagttcattcacaatgtaatcaggggcaattacgctttcatttccaacacggatatatgcttccattacgccgtctgccttgtaataatatggggtgctgcggccgggagaaacctccagagctaatagatttttaccatcttcctgcaatggctttaagataaactgcggtaatggtgtgatacgttctttgattaagcggctgatcgcttcagcatccttttgaacatcagacaagccgataggcttccggtcatcagagaccccgaaaaacagagtgccgccgattccattggaaaaggcactgacactttttaaccagcttttgggtttctttatttcaagtgcaactttgaaatcacattcggttgcttcagcaatgagctgttctatcataaaatccctcctttgaggtattggtagtttctttatattatacccataaggagagtttatttcaacgataggcacaaagagttcagagaaaatattttgagaggagggctttttatggcaactacaagaatcatgccgcttcatgtcggcaaaggccgcacagagagtcgggcgatcagtgacatcatcgactatgtagcaaatccacagaaaacagatgacggcaagctcattaccagctatgcgtgtgacagccggactgcggatgcagagtttcttctggcaaagcggcagtacattgccgctaccggacgagtgcgtggcgcggatgatgtgattgcctatcatgtgcgccagtccttccgccccggtgagattacccaagaagaagcaaaccggctgggcgtagaatttgcaaggcgttttaccaaaggcaatcatgcttttgtggtatgcacgcacatagacaagtcgcacattcataatcacattatctggtcatcggtcagcttagaatatgaccggaagttccgaaacttttggggcagcaccaaggcggttcgtcggctaagtgacaccatctgtattgagaatggactgtccattgtagagaatccgaaacttcacggaaagagctataacaaatggctgggcgatcaggcaaagccatctcaccgagagctgcttcgtgtggcgattgacaacgcattatcacaaagtcctgctgactttgaagaactgctgaagctgttgcgagaatatggttgtgaagtctcaaagcgcggaaaatcgtatcgactgaaactctctggttgggagaaagccgcccgcatggacagtctgggcgaaggatatggattggaagatttgcgggcagttctcttagggaagaaagcacataccccgcgaaagaaaacagtcacacaggcagagccgccgaagatcaatctgctggtggacattcaggcaaaattgcaggctggaaaaggtgctggctatgctcgatgggctaaagtttttaatctgaaacaaatggcgcagaccatgaattacctgtcagagaacaatctgctggagtatgcggttttggaaaaaaaggctgcggctgccacggcacatcacaatgaactttcggcgcagatcaaagcggctgaaaagcgcatggcagagattgctgttctgcgtactcacatcgtaaattatgccaagacccgtgaggtctatgtggcataccgcaaggcgggttactctaagaaattccgggaggaacatgaggaagaaattctgctccaccaggctgctaagaatgcctttgatgagatgggcgtcaagaagctgccaaaggtcaaagagttacagacagagtacgcaaaattgctggaagaaaagaaaaagacttattccgagtatcggcgctcccgtgaggaaatgcgggagcttttaacggcaaaggcaaatgtagatcgagtgctgaaaatggaggtagaacaggatgttgaaaaagaaaaagaccacggccagcggtaagctggtcctggtcaaaagcgttcgcagaacgcgcagccacagaatgaaattctgtgttcaaaggggcttgggggcgctgccctcaacaagcaagcggagaggaaaatcacggatggattttcttctctgcgggcctgtgtgtattaacacaggcattgcttgcctctttcccgcagaaataaaataagccagtgacgaaaccttcaaatttcgctcactggcctactttgcttcaagtttcttggcgagttcctttagttcctctgcaaatccacgagtgtggtgcaacaatgtttcacgcatctctggcggacagttcatgtaaagtagcttcatctcattttgtcctgcttcgtccggcgagagatccgggtacataagcgagtctagtgaaagatgaaccacctttgccaatgctttcaagatcagataggaaggatttctcctggctttctctatatcggcaatctgtttggtagaaacatgggattcatctgccagctgttcctgcgtcagatttttttcttttcgtgctgctcggagcgcatcgcccaaggcggtcaaatcatcaatcggcattatcgttcacctcaataatattgtatcgttccggtttgatttgaggaataaccttatcattccggtctgccagtacgattataccgatttttattctaacagcatggttataggcttgttttcttcgagcaatagaaatataatagaatagattgcaggaggtacagagatggattatatgactctaaaagaaacaagcgaaaaatggggcgtttctgtccgacagataaactattattgcgccggtggtcgtattcccggcgctgtaaaaatggccggtgtctggctgctccccaaggacgccgaaaagccagtagatatgagaacaaaacaaggaaagggtaaaatatgaaaaatatactgttaattgaagatgaagaaaatcttaaccgtggtataagcctcaaactcaagaaggagggttatgcagttttttctgcggcttgcgtttctgaaggattgaaactatttcaagataatacgattgatcttgtgatttgcgatataggcttaccagacggtagtggattagatttatgtgctaatattcgacagcgaagtgatgtgctatttttgtttctcacggctcttgatacagaagtcgatgtgataacaggatacgaaatgggagctgatgattatgtgacaaagccgtttagtatgtctgttcttgtctcaaaaataagtgccatgctgaaacgaacagaaaaggctgtttctaatattgtgcaaacaggcaaattgacattttatatagatgaaaagcgtgttgtgaaaggtgataatgcaatttcaattacaccgacagactggaaactattgatggcttttattgagcatccccaccatattctttcaagaaaacaacttctggaacgtttatgggattccaatacggattatgttgatgaaaatgctgttgctgttaatattcgtcgccttagagaaaagattgagcctgatccatctaatcctgtctacatcaagaatgtacggggcttggggtacgtctgggaaatggagtgtgaaaggcaatgacattaaataacaggactttcacactactaaaaattgtattgcttattataattagcatatttatagcagaaattattgtgttacctaaaattgaacatgatatgttgcaagaagcaggtagacaggaattggtaaccgtacaacaaatatgtggcgcggtacttgaaaattatcctgatgtagagcaggatttcattctgggattgcgtcagcctacaaactctttgcaggaaaaaggcgaacagattttgaagcaatacggatatgacgaagaacatttattggcagacaacacgctgtatgccgcttacatgattgcatggagaaattggacaggattttttctggttaccacatttttacttcttgcggccgcacttctctatttttacagcactatccgtagtagcaataaagaaatattgctgatattggaacaatatttgtcagaggatttttcttttgcctatggaacagagagaatcgtaaaaggccgtattcactttatgagcaatcaaattggtgatcgcttaaagcaactcggacatcagattgtaacgaaaaacacccggattactgaggaaaaagaaagcacaaaagcacttgtgactgatatttctcaccagttaaaaacaccaatggctgcattgaaaacctgcttctatatgtatttggatgcctctgatgcggatgaaaagaccgaatttctaaaacgaagtgaaacgcagttggaaaaactggaacagttaattgcaagccttatgaatatttcacggttggaaacagccatgatttctttgactaaggaatccattttgttaagtgatctattggtggatgctgtaaatggtgtatacgaaaaagcaaggagaaaaagcatcgaaatttccgtgcaggaaacagaaaatattacattacatttagacaagcattggacaagcgaagcagtcataaatgttttggataatgcggtaaagtatagtcctcgaaatagccacatcacgatttctattgaaaaacaacacttttatacactcgtgaaaattaaggatgaagggattggtattccacagaatgaatacaataaaatttttcagcggttctatcgttccaatcattcttatgtaaagcaaacggaaggcagcggtgttgggttatatctgacacgaatgattttagaacgacagggaggtttgatccgtgtcgaatctgttccggaaaaaggaagtacatttattctacaatttaggaactgataagaggccggagaaattccggccttttgttattcaacggtaagctattctgtaaggttcccgtaatacttctttgatacaataatcatagttaaggtacgggaggaaaagatggatatatcgtcactaaataattactttgaattgtatggaggaatggctatcttcattgttgtactactggaatatatgaatcttcccggattcccagcagggattattatgccgcttgcaggaatctatgcagcacacggggggataagtctccttgcagctattgctatttctgttttagcaggagaagttgggagctggatattgtattttctgggaatgtacggtgggaatgcttttctcaaaatatacttaaaaaggtttcccaaacacaaacctgcgtttgaacgcacgtttgatttaatccgacgcaagggtttttatggaattttcatcagtaagctaattccgatggttagaacattgatttctataccagcaggcgtattaaaaatggagtttataaaatactcgattgcttcatttttgggggtaacactttggaataccctattcgtgggcgctggctatattattggagaacctatactgaaaataatcacaagggggtgagaaaatgcggattgctatgatgacaaataactacaaaccatttgttggcggtgttccaatttcgattgagcggcttgctgatagtctgagggatttagggcattcggtatacgtctttgccccggattataaatctccggtggatgatgatgaatatacgtttcgctttccaacaatgaaacacaagatcgccggagcgattcctattcccaatttgatttatggctatgtgaagaatgctatttcaacacttgatattgatttgattcatgttcatcatcccgttatgatcggaaatgtggcaacacggattggaaaggaatttcatatccccgtagtgtttacataccacacaagatatgaacaatatctgcattatttgacgccctttggttatttacaaaataaggcaaatcagggaaatctattgggggaatccatccttgattttgcacagcggcaagtcatacaacgctatttgaatcgcttccttgaaaaatgtgatatggtttttgcaccaacagaatctatacaaaattatttgaaaccattccacatagatacaccgatcagcattgcacctacgggactgcctccggcttgctttgaaaatcatatcgaggcaactgccatccggaaaaagtatttgcagaagaaacagtatttgttctgtacggtttcgagattagcgaaagaaaaaaatctttctttcctactacgaggtgtttctgctgtgaaaaagcagttaggagatgtttttaatgtgcttattttgggagatgggccagagaaagaaaatttaatagccctgtctcaaactctaaaaattgaagaaaatgtatttttcattggagaagtatcaaatcataaaatttcagcatatcatcaggcgtgtgatttgtttctgttttcatcaaaatctgagacacagggaattgtgcttttagaggcaatggcagcgtatctaccagtctttgctattcgtgcaaccggagtatcagatgttgttgttaatggagaaaatggtgtattgtcgtcagattccataactgaatgggcggacaacttgatttcaattttgaaaaatcctgctgtacttataaaaatgagaagttccgctcgtaccactgcccttttatatgatgaaaagagtatcgccaaccagattttagagagttacgcatacttgaaaaagagctatgaggcagaacattggctgatgatgcacttaaacagaacaagttaccccgtattggcaaaggagtattaagatggatattattcttgaaacaaaagacctgaccaaaacgtataaggcaggcggtaatcatattaacgcagtagaccatacctctatttgtgttgagagaggcgattttgtaactatcgtaggtaagtctggatcgggaaaaagtacgttgcttcatctaatcggaggactggattatcccacttctggcgaagtctggattgataatgagtgtataaccaatatgaatgaagaagatttatccgcatttcgcaggagaaaaatcggcttcatttttcaggcatttaatcttgttccctctttgaatgtctgggagaacattattttgcctatcggattagatgatagaaagccggatatggtttatctgaaagaaattattgaattacttggattgagcgagaaactgaataatcttcctaacacattgtctgggggtcagcaacagagagtagcgattgccagagcattggcgacgaagcctgccattgtattggcagatgagccgactggaaatcttgattctaagacaagtgatgaagtaatggcacttttgaaaacatctgctatgaagtatgagcagacgctcattgtaattactcataatgaagatattgcacaaatgggaaatcgaaaactggtaattacagatggtaaggtggtggaacaatgaaaacaatttatcatttggctatcagccgattgaaatataataaaggaagatccattcttaccatagttgcgattgctcttatgacaacactgctcatgtctattggtagctctgcacttacggttattcgacatcagcagttagagataaaagaaagtgctcgaaattatcatgcggctttcaaaggcagtactgcagatcaggtatttattcttgaaaatcacgcggatgtagaatcgctttctacaagggaaagtgtagcgtccatagaactgccgaaattaaatgctgttcttaattttgattccacaaaaaaaggttctattgaccaaattcagttagccaatggaaagatgcctgtggaagcggatgaaattgcagggcctcctgcgctctttgaaagattagacgttgtaccagaaatcggccagaagtttcagattccattacgcattcagggaggcaaagtggagaactacgacttcacaattactggtattttagagcagacagacatttcaaagctgaatgtgaatgaaacacgtcttgtctatggggcttttgtatctgaaaaatttgttgaacaacatattgccccagaggatagaacttatacagcttatatacggattgtaaacgaaaataaacattcaaaagatgaaattgagacaattatatctgagattgcagaggacgtaggactgaacaagtcagacatttcttttaatgaacaatacctgacatatatgaccaaccccggaacacaagaacgaaatgttatgatcgggcttggactgttggtagtatttcttggtggcatggtaatttacagcatttattatgtttctgtcatttccaatatacaagagatggggaaactaaaggctcttggtgctaccaaaaaacatattcgccgcttgctatttacagaaagccttgcacagtctttcgtcggaattccctgtggaatcttacttggatacctcgcaaccgtattcttgttcagaatggttattctttccggttctacctttggggatacattctggcactggcaggctgctatttgtgttatcgtggttgttttgcttacagttggggtttctatccgaaaaccgttaaaaatggcgtcagggatttctcctgtggaagcaatgcggtatcaagaaccgacaggaaaacaaaaaaggaaaaaatcctttaaaacactttccgtatcaaagctaagttatgcaaatctacaaagaaataagcgaagaactgcggtcacgatacttgcactgggctgttccggcattttgtttttagtagtagccaatattgcaaacaatataactgcggaaaattatgcaagaatgctgatgccaaaaggcgattttgaaattagccttaattatgctgaggacgatcgagagtacccggagaataatctaaatataattcagcttcaaaatcccttgaacgatgatctgaaaacgcaaatcatgtctttagatggtgttgaaagcattgatgaaaagcacacggttctggcagaagctgaaaatgtggtattggaaacacagcgaactgaggttggaggaatcagcgaaaacgatctgttatccctaaataaatcgctaaaaagaggaaccttggattatgatgaattggttcattctaacggcattatttttacatgggacattttgtttgagcaatatggttttgaaattggagatacaatacagcttacactttatgatggaaacaagaaaattccttttacgggtactctcatggcaagtaccaacagcagtgatgatacctttttgattgccgatgaggttttacagcaactaattacggagacaaatcctgcgagtgccatttacattactgttcagccagaaaaatttgaaagtgtaaaggcacaaattgatacactgcaacaggaaaatacgaggttcatgttcaaatcctatgacgaagaacttggaatcgcaaagcagctaatccgcacgatacaatacacaatttacggattactgatagtcattggaatcattggttacatcagccttatcaatacaatgattacgagtattttagttcgcaaaaaggaattgggaattttgcaagcaatcggtttgtctgataagcaactacgtcaaatgatacatcgggaaggactgttctttacttttggaacattagcactgtcactaaccatcggaaatgggctggggtatttattggtacgcattattataaacacccaaattctaacgattagtcaatacgaatatccgattacccaaacgcttgttttgatagttgcagtagtcatcggacaaattgcaattactgtatttgtaaatcgctatattcataaacaatcgttagtcgaaagaatgcgtgactaacagaatacaagaaagtgaaaacagatgcgaaagatacttttggttgacaatgatataacttttatatggggattgaaaaaatatttacagcggcggggctatgcggtagaaactgcggctactctggctgaagcacgggaaatgataaagcaagaagctccgctgctgatctgttcagacctctgcttgccggacggttctggtctggaactactagctgaagtacgtacctgtaacaaagatactccttttatcattgcgtcttgttatgaaaaagacgactatgagcaggaagcactccagcatggtgtcacaatctgtatggataaaattaaatctgcattattgaaagataagctggtggaatatgcctacaaggagctatcagaagaacaaccaccaacctttcataagctgttatatctccatacggataatagcaaagcggaagttctgcgggcggctatgctgcaaaagggatttaatcttatactggtaaattccctgcgtgaagcaaagcacaggctacttgaagataaagaaatagaactgatactgtgtgatctctcgctgccggacggtacagcccttgagctttttcatgacatacgacgtatatctgaaaaatttaaggtaaataacccgcccattaagttgctaccattctttattcttacggcaagcactgaccttgccacggaatatcaataccggcacgagggtgtcagcgactatatcacggccccggttaatatcccggaactgattcggcggattctgttttttgtggaatagctatctttctctctatgtaatcaacataatcaactgccgggcgacgaccaagaaaaaaaagccgtcgtacagcagcccttttgacacgcccatacgaccagcggcggctttgaacaatcaaggccgccgcttttcttttcccggcgcaggatcggcggcccacggagggagccgccatgagagtagcaatatgtagttcatcaaaaaaagccttgctcacacctcatccccttacgctcctccaccggcattatcctgctggttaatcggtaatcatagaacatggaatcagtgtgacgccagtttcccactttgggagactggcgtttttgcttgttgttttttgtggaattgccccgaattatgccggtgccgttctccgccccatttcggctcactcgtaactggacccgtgaaccgaaatggaggtacataatgaagaaagtcaatctccgggatctgtatcccgatgtttataaaacagatcactttgtagaagtaaccgaagatgtgctggagacgatcagagactctgagcgtgcagaagctgcctatgaccgaaggatgtatcgttataaggcgcattactctctggactgcgacaatggcattgaaaatgcgatcctgatgaagccccagacgccggaaatgctcctggaggaaaagcagctgcgggagaaactctatgccgcagtaatggctctgccggagaaacaagccaagcggatctatgccaggtattatctgggcatgagagtaggagagatagccgcagcagagggtgtagacccaagccgtgtccgtgacagcattcggcgagggctgaaacagctggcaaaatatttttgataaaatttcgtttggtgcgctcgttttttgctctttttgtcagagttaataagaaggacaagttttcccccttcaacagcactttgacaatttcatagacagcataacaggtacataacccgtgtacgagcgagtgtggaacgccgcgaagatagagcagtcagggaggtgatgaacaaagctgctttggagcgatctacgattccacaaaacggatggtggcagattcggcgcgatgactgcatgggggcttaaagatacttcctcacggcccgccaaagacttggggggaaccctgcggcacacgatacgaacgatgctgcggagttatgacagctgcgccagcggagacctgttgtgttcccatcgtcagggggcgtggcaaatatgacgagtaatccgaacagaataacagtagccgcaccaggtttttatccggagatttctttcagactggtgcggctgtttaagtattaagatattaaggaggcgagagtgatgtttgaaaaattccatcgaggcgacatatattcggctgatttaagccctggtatcggctctgaacaaagtggctctcgtcctgtactcattcttcaaaacaatgtgggaaattgtttcagtcctacgattattattgcagcaatcaccagtgtaagcaaaaaaagcagaaagttccccacgcattaccacttaaatgacagatgcggtttggtgaaaccatctgttgttatgctggaacagatcagaacaatcgacaagtcgaggttaaaaaactatattggtcatctaaacaaggatgacatggaaaacataaacaagacgctcttgtgcagtctggggattacataaaagtgccgaaaggccgtatcattttcaggctgtgcaagtagagttataatttcgttaggaattgcggaggtgattctgaatggagaatatccagaataaaagcgcattgattccttcagatgaaatccggtcagaagaacttctggcggaacaaaaatttgaagcgtttatcacttcgctggcacatatcatcgagaaatatggtatgagagtgctgggcgaggttgacggagctgcgtgagaatcgcagctttacataggatattttccaaaagtaaattttggaggtatgaattatgaaccgatatggaaaacgctgtgttttgtatccgagggtcagcacagagatgcaagtggacggatacagcctggaaggtcaaaaaaatatgctgacacgatttgcggatcgtgaggaaatgatcgttgttgatacttatgaagatgccggtaaatccggtaaatccattgagggacggcctgcctttcaaaaaatgctcagagatattgaggatggcttggacattgactatattttagtgtataagctgtcacggtttggccgtaatgcagcggatatacttaactctttggagttggttcaatcttatggtgtaaatctgatttgcatagaagaagggattgattcctctcagacaagcggaaaacttttgatttctgtactatctgctgtggctgagattgagcgtgagaatattatcgagcagacgatgaacgggcggcgcgaaaaggcacggcaaggtggatggaatggtggctttgctccatacggatatacactggaagataacaagctgatgattgaagaaacagaggctgtggcaatacggaagatttttgaattatatacttcatcggaaatcggtttgggtggtattgcgaatcagttgaacttacaaggtatacggaaaattccgaggcagaatggcacattagaggattggacaggacattttattaaactgatattggataacccggtttattgcggtaaaattgcctatggacggagaacgaaggaaaaagtcaaaggcacaaaaaacgattaccagatgaaaagaaatgacgattacattctgacagagggacagcataaaggaatcgttagtgaggaggtatgggaaaaggctcatgccaagcgccttagaaccggagtaaagcaaccgtcaaaaattgggcgggatcgagttcatttgttatccggtctgctgaaatgcccggtttgtggaagtcccatgtatacgaataaacacgcatggacaaataaagatggcacttacaaagaaatttactattatgtatgtagtcggaataggatggtccggggtaagcattgtgaatataaggcaatgctgaaaaagaccgatattgaaccgatggtcattgaggcaattcgtgagatcgtaagaaatgaggaatatgcccaagccattaaaaaacggattggcgttcagattgacacgaaagcagtggataaagaactggagggctatcaggcaaagctgaaggaagttgatctgaataagacaagattggaacgggaaattgacagtctccctgctgatgcaaaataccgggaacgaaagctccatgatatgaccttgcggttagattccctatatgatgtcattgttgagctggaggaaaaaatcgaagatgccagacttcggcgagatgcaattaagcagcaggcaattactcttgagaatatttacaaaatcatggtgaatttcgactgcgtttataatataataaatgacgaagaaaagagaaatgtggtcacagccttgattaaggaaattgaaatttacaggaatgacgagtctgaatatccgctaaagcggattggtctgaattttccggtgttcaaggatggcggggaagttacggagcttttgtgggacaaagggaataccgttgagacggtatgcgcattgtaaaaactggatatccacggcaaaaagccgtccgggagacgttgaagcttttttatcgcgagtcaaaaaaatggtgtgtcattcaaacagcatatttgcgatatgcaatgcaacgctgttgcattaaaaagttgaattgctagttgaatgaaaataagcggttcccggttgagaaaagttttgcggagtgatatactaatattgtatgtacccggacaggggtgtcagttcacagagcgagataatttgtaatggatggctatttctttattttaacgaccattgatctttttgtgcttggctttatgtgccttcttacaaagctgagcgaatctttgaataaaaagcagaagcgcgggttctttctggcctttgcgctgatcgcggcgatctcggtgctggaagtcatcaccattgtggtagacagcacaccgccgggctaccgctggctgaatattttgtccaactatctgggcttcgggctgacaccggcggtggcgctgtgccttgtatatgtgctggacaaaaaatccgtcatccggcgcgggttcaaggcagcggtctgctgcgagggtgtgtatctgctttttctggcggcaacgctgccctatgggccggtgttctcggtgagcagggagaacctctacgcccggggtgagcacttctatatttatgtcgttatgtattatgtctccatgctgtaccttatggtggctacggtgcgtacggcggcggtctttcagaaccgcagccgcacgctgatctacccgctgatcctttttctgggcgcggagactgtgatccagatcgcgctgccgaagctgcacgtcacatggctgtgcgtcacgttgctgtcggtgctgtattatatctattgcagcgagatgtggaaccagctggacgcgctgaccggacttttgaaccagaacagctacctgaaccgcaccgccgagatgcgccgcagcggcggggtgctggtggtgttcgatgtggatgacttcaagcagatcaacgaccgctacggccatttacagggggacgtctgccttgccgagatcgcagactgcatcaaaaaagcctatgcccgctgcggctactgctaccgcattggcggcgatgaattctgcgtgctgctgaaggacgaagcaagcgaagcctgctgcgcagcaacgctgcaagctctgctggcagaacggcgcaagacgcttgccattttgccaacggtctcccttggctctgccgtcttttccggggaggacgtggtcgcagtgaaggaccgtgccgaccgcgcgctctactgtgctaaaaaggaacagaaggcccgcgccgcagcggcaaagcccgcagatggcagcgagcggacagcctgaagccctgcctgcacaccttataaacggaggaacaccgatgaacacagactggaacagcccgcagggcgattttgatactgctgaaaagcagggggagctgctgatgctgctcagtcggcagcaagtcaccgtgcacacatgggacgacccggactttgactacatggaggagcaggatctggcgctggtggtgcaaagccctaccggcacagaggatctgctgattgagctgtgcggggagttctcggtgttttttgaaaagtggcacggcgagtacgccgccaccgccgagggctacacgcagctgcagcaggacatcaccgccattctggacggcaaagcgggcgcactgagtctgtacgcagagaacggctggcagggcacggtgctgtgcaccgagctgcccggcgcagaggacgccggagccgctgcggtgctcaagcgctgctggcagacggcaaagccggacaccgccctgcctgcgggcagtcggctggaactggtgtgctgggacccggcacagaaccggaaagtgcagctcccggcggagaaatgatagaacaaaaaggtcgctgcacgcatttgtgcagcgaccttttttctttggctagaattcaaaagaattttttatagatgctggaagtcgcatagggtagcatcctcgccctctccgtcacctacggtgacacctctcccaaagggagaggccttggcaaagagatgaagcttatgtggactgccaaaggctctccctttgggagagctggcaaatccataggatttgactgagagggcgagcttgctaaaaaatcgctgcaataaaaggtatgcagaactttatacaatttgttgtttctctttgcgattcgccacatagtttgcgattgcggaagccgcagcgcccaaaacgatgcccagcactgcgccgccgaggatatcggtggggaagtgcacatagaggtacaaccgggtaaaggcgataaaggctgccagcaccagcgcgggtgcgcccagcttccggttttgcagccagagcgcgtaggcagccgccaccccggaagcggtgtgcccggaggggaaggagtgcccgtgcggacgcgccaccagcatggtgatggaagtgttgatatcacaggggcggggacgggcgaacagcggcttgaggaagaagtgccccgccgccatgtacagcaccagcgccaccgccatggcaaagcccgctttgcgggtgcgccggaagagcagaagcagcagggtgaaggcaatccagatctcgccgtgagccccggcgtaatcaaaaaagatggagatcgtgttcattaccgggttgcggaactggtacagccagtccagaaaagcaaactcaaagggcatgggttcctccttttgggcggtgaaagagcggattttttatacaatatagcatataaatattaaaaatacagaatgcgctgtaaatttgcgcggacattagttttccgaatgaaggcttcccccggtcgggggaagctgtcaccgaaggtgactgatgagggcgtgggcaagctgctgattgcgagaaattacccctcatccgtctgctcactgcgttcgcagccacccgttcccccttttgtcgctgcgcgacattttcccccggccgggggaaatctgtccccaaggggtgaaggcttttgctccgggtcgagctgcaaaaattgatttctatgatgaatcgtcctcagggcaggggaaattccgtttccatctgctccaaggtggggtagctgtcgatggcgccgtggtgctgcacgctgatagcgcagaagcggttggaaaaaatcagatactcggtcaggcgcttgcgggaaagctttggcagttcggcgggggtcaccccgtcccgctgcagctgccacaaaaacgagccgataaagccgtctcccgcgccggtggtgtccaccgccgccaccttggggctgcgggcatgggcgctggcggtgcgggtataggcgcgggcacccttgctgccgcaggtgtacagtaccagctgcacatccccggtaaagagcgcggacagcgcggcttcaatatcctcggtgccggtaagaaagggcagctcctcgtccgaaagcttcaggatatgggtcaggggaagaaactgccacacggtctggcgcagctgctcccggtccggccagagagggaagcggagattggggtcaaagctgaggatggctcccgcctcccgcgcggcagtgatggcggccagatgggcgtagcgcatggggctatccaccagcgagacgctgcaaaaatgcagggcaaaggcctgcgagaaccagcccggatcgatctgctccggggcgtacagcaggtctgcggagggtttgcggcagaagctgaaggtgcgctcgccgttttccgctaagctgacgaaggccagcgcggtgctggctttactggtaaattccagatgggaaagctccacgccgcatccagccagcgcccgggcgatcttgtgaccgaaggggtcgtcgcccagctggctcagcagcgcactgcgcccgcccagccgggcagcggcggcacagacattggccggagcgccgcccacccgggggctgaaggcgggtacttcgtcaaagctgcaccccacccgggaggggatcatatcaatcagcgcttcgccgatggaaaataagatcctgtcggacatagggcttcttcctttctgcattcaggtgtgccgcacagtgcggcagtgtacagtatacacccgcagggcgctgtgcgcaactgcttcttttatacggtaatgggcgggttttgcggttgacttgcggcggcagatatgctacaatttccagacgtatgcaacaacaggaaaaggaaaaagtgtatggatctgacaaaacagttctttaaatatgtctcgcagaatattttcggcttactgggcacttcgtgctatattctggccgacacctattttattgcacaggccgccggcacagacggcgttaccctgctcaacctctgcctgcccatctacaactttatttttgccattggctccatgatcgcgctgggctcggccacccgctacgccattgccaaggcgcagaacgatgcccggggacagcggtatttttccaacgccatcctgtgcgccgtgctggcgtccatcccgtggatgctggcgggtgcctttgtgcccggggcgctgctgcggctcatgggcggcgatgtgggcatcgtggcactgggcatcccctacgcccgcatttttctgctgttcaccccgttttttatgtgcaactacatcgtgtcggcctttgtccgcaacgacggcgacccctcccttgccatggtggcgaccttgagcggcagtctgttcaacgtggtgttcgactatatcttcatgttccccttgggtctgggcttggccggtgcggcactggcaacggcggtgtcgcctatcatcagcatcgccatttgcagccgccacttctttaaaaaggagaacaccctgcaattcgtgcggcagctgccctcggcaaggctgctggggcagagctgtcagctgggcatctccggctttgtgggcgagctttcctccggcgtgaccaccacggtgttcaactttctgctgctggggctggcgggtaacgtgggcgtagcagcctacggcgtggtggcaaactttgcgctggtggctacggccatcttcaacggcgtggcgcagggcgcacagccgctggtgagctgctgctacggtcagaacgaccgcgccggggcgcggaaactgctgctgctgggcagcggcactgtgctggtgctggcggcggtgctgtacgctgcggtgttcggcctgaccgatccctttgtaagctggttcaacagcgaaaactcgttgcagatggcgcagtacgcccacaccgggatgcggatgtactttgtgggctacttctttgcgggcttcaacattatggcggcgggctatctgagcgccgtgaaccgcccggcggaggcttccatcacctccatctgccggggcatggtggccatcgtggcctgttcgctggtgctcagcgcggtgtttgggatgccgggtgtatgggcggccttcccggcctcggagctgctcaccgcgctgctgaccctgtttctgctgcgcagaaaagagagcggaaaagcttaaatatacatctcctgttcccgcatggtctcctcgggtgtaagcccggcctgtgcggcgcgaccggtcagtgcccgccattgtgcaggggactggccggtttcttttttgaatacccggcacaggtagttggccccggaaaagccgcacaggcttgccaccacgtccagcgtgtactcccggtgcagcagcagccgctgcgcggcttcgatgcgcacggtggtcaggtatttgcccggcggcacgcccacggcggcggtaaaggtgcgcacaagatggcttttggagacgcccagccgctcgctgagctcctccacgccgtacagcccggcatagttggcgcggatatcctcaatggcggcctgcaccagcggcggcagggctggcgcggcgctgtcggcatccgccagctcgcacagcagggcaaagaccagctggctgcgggcacggctgtgggtgagcttttcctcggcaagccgccccatcagctcagcggcggcagggcaggtctcgcctttggcaagatagggcagctcccgcaggccgttcaaaaactgcgtgctggcctgcccggtcagctggacgcacagcaggtggcagctgtcctccggggtcagggtgagcggggcgcggctcaaaatcaggtgtcccgccgcagcggactgcggcggcagcaccagcacagagccggaaggcgcagccgatgccccgggcagggaagctgtgcatctgccgctggaaacaaggcagacccacagcccctcgccggtcagggtgcggggcgcggaaagctgcacatccagcagcgcagccggtgcggcgatggtgttccagtcaaacagcaatatctgacacctctaatcaataaaatgctattttatatcacaaaattatctgttattatagtaccaacgaaacaacacgccgtcaagggcgtgaaacatcaaatattttacggaggataacgattatggcttccattagctgccagcacatctacaagatctatccgggcgcaactgccccgtccgttaccgacttcaacctggagatccaggataaggagttcatcatcttcgtcggcccctctggctgcggcaagtccaccaccctgcgtatgatcgccggtctggaggagatctccaagggcgagatgtacatcggcggccgtctgatcaacgatgttcccccgaaggatcgtgatatcgccatggtgttccagagctacgctctgtacccccacatgaccgtttacaagaacatcgctttcggtctggagctgcgcaagaccccgaaggacgagatcgacaagcgcgtgcacgaggctgctaagatcctggagatcgagcacctgctggaccgcaagcccaaggctctgtccggtggtcagcgtcagcgtgttgctctgggccgtgcaatggttcgtaacccggcagtcttcctgctggacgagcctctgtccaacctggatgctaagctgcgtacctccatgcgcaccgagatcatcaagctgcacaagaagctggctaccaccttcatctacgttacccacgaccagaccgaggctatgaccatgggcgaccgtatcgttgtcatgaaggacggcatcatccagcaggtcgataccccgcagaacctgtacgatatgccctgcaatatgttcgttgcaggcttcatcggcagcccccagatgaacttcctggacggcaccctgatcaagaagggcgatctgtacggtgttgatctgggcggcgacgtgatccccctgcccaaggagaagaccaccgacggcaagctggattcctacgttggcaagaagatcaagatgggcatccgtcccgaggatatcgacgacgagcccgagtttatggcaaagcacaccgactgccagctggatgctcaggtcgatgtttccgaaatgatgggcgctgagatctacctgtatctggagtacaagggcaacaagatgaccgcccgcgttgctcccacctccaaggctcgcaacggagacaccgtccgcgttgcattcgatccccataaggtgcacctgttcgacatcgagaccgagctgaccatcctgaactaagacttagcaaagatcatttttgatcctcctatcatacgaaagaccgccgaagggaaaccttcggcggtctttcgtttcagtgcggcctgcgtgtccaaaaccttgcgctgtcctcttgacaatcggtgcgggcacggttaaaatatgtactgtatcaaacagtttcacatcgaacaacttgaacagaggaaaaacattatgtgtacacagcaccctattgaagagcactgcaagctggacccgccgtgggatgggccgcaggtcattcccgcccagctgcgccgggtggataacctgatcttccgcaggctgaaccagttttcccgcgccaacggggtagagcagaccacccccatgcacgggtggatcatcgagtatctctaccgccaccgggacgagccggtgttccagcgggacatcgagcgggagttttccatcacccgctccacggtgacgaacattttgcagctgatggagcgcaagggctacatccagcggcagagcgtgccgcaggacgcccggctcaagcagctggttttgaccgaggagggcatccaacggcacgaaaagaccctgctttccttccaccagaccgacgattatgtggccggactgctgaccgaggaggagaacgcagagctgctgcggctgctgaacaagctgcgggaagcactgaaataacgaccttttccgtcaaagcgccgaaaaaaggcttgttaaattagtaattatgaacatttcacgaaacgtcttgacatttaaattgttttgtataaaattgttctgtaccaaacaaataaatttaaataggagggaactcagatgatcaaaaagcttgtgtcgcatctgggcgagtataaagccgcctcgatcaagacaccgctctttgctgcgctggaagccattatggatgtgctgctgcctaccatcatggcctttatcatcgatcagggcattgaaaagggcgatatgaacgccatcatccgctatggcctgcttacctttctggtggcagccattgcgctggtgctgggcgtgctggcgggcaaatacgccgccgaggcatccaccggctttgccggaaatctgcgcgatgccatgtatgaaaatatccagcattactctttttccaacatcgacaaattctccacggcaggtcttgtcacccgcatgaccaccgacgtgaccaacgtgcagaacgctttccagatgattttgcggatgtgcgtgcgcgctccggtgcatctggtgtttgcaatgttcatggctgtggtcatcggcggcccgctgtcgctggtgttcgtggtggcggtggcttttctggtggcggtgctggctgccatcatgatccccaccttccacatctttgaccgtgtgttcaagaactacgataacctcaacgcctcggtgcaggagaatgtctctgccatccgcgtggtcaaaagctttgtgcgcgagggctttgagaacgaaaaatacaccgccgcctgcgagagcctgtacaagcagttcgtcaacgcggaaagccgcctgagcttcaataaccccgccatgctggtggcagtgtacggctgcaacatcgcgctgagctggttcggcgcaaagtatgtgctgcacggtgccattaccaccggccagctgaatgccctgtttggctatatcatgaacatcctcatggcactgatgatgctgagcatggcctttgtcatgatcgccatgtccgccgcctctgccaagcgtatcgtggaggtgctggacgagcacaccgacctgcccccggcaaagcagccggtgcagcaggtggcagacggcagcattcagtttgaccatgttaccttcaagtataagcacggcagcggccagccggtgctgaacgatatcagctttaccatccagcccggcgagacgttgggcatcatcggcggcaccggcagtgcaaagtccagtctggtgcagctgatcccccgtctgtacgatgccgagagcggcaccgtgcgcgtgggcggcgtggatgtgcgggattataaccttgacgtgctgcgccgcgaggtctccatggtgctgcagaagaacgtgctgttcagcggcaccattctggataacctccgctggggcgatgccaatgccaccgaggaagagtgcatccgcatggcaaagctggcctgcgcggatgaattcatccagcgcttcccggataagtacaatacatggatcgagcagggcggctccaacgtgtccggcggccagaagcagcgcctgaccatcgcccgcgccctgctgcgcaagcccaaagtgctgatccttgatgactccaccagcgccgtggacaccgcgaccgatgccaagatccgcaaggccttccgggaagagatccccggcacgaccaagatcatcattgcacagcgtatctcctcggtgcaggatgcagaccgcattctggtgctggagaacggccagatcaacggtctgggcacccacgcagagctgctggcgaccaacgccatctatcaggaggtctacaacagccagacgcagggcggcggcgattttgacaagcagggaggtgcgcagtaatggcagtaaaagaagtacatggccccggcccgcggggcgcacgggggccgcgccccaaggtggaaaacccgggcaagctgctgaagcgcattatggatgaggtgttccacaactatctgccccactgcatccttgtgctgatctgcatcgtggtcagtgcgctggccaatgtgcaggccagcctgttcttgcagactttgatggacgattacatcgtgcccatgacccgccagcaggaccccagctttgcaccgctggccggtgcactggtgcggatgtgctgcatctaccttgtgggcattctggccgcatgggccaacgcccgcatcatggtcaacgtaacgcagggcacgctgcgcaatctgcgcaccaagctgttcacccacatggaaagcctgcccatccggtattttgacacccatccccacggcgatatcatgtccgtgtacaccaacgatgtggataccctgcgccagatgctcagccagagcatcccgcagctggtatccagcgtcatcaccatcgtgtcggtgttcttcagtatgtgtatgctcagctggcagctgaccatcgttaccatgctcatggtggcgctgatgctgttctgctccaagcagattgcaaaaagctcctccaagtacttcatccagcagcagcgggatttgggaaaggtgaacggctacatcgaggagatgatggaaggccagaaggtggtcaaggtgttcacccacgagcagcagacccttgccggcttccatgagctgaacgaccagctgaaggaaagcgccaagcaggccaacgccttctccaacatcatgatgccggtcaacgcccagttgggcaacatcagttacgccatctgcgcactggttggtgcagccatgtctgtgggcggcgttggcggcatgacccttggcaccgtggtggccttcctcagcctgaacaagggcttcaatatgcctatcagtcaggtgtccatgcaggccaacagcgtcatcatggcactggccggtgccgagcgtatcttcaagatgatggacgagcccagcgagaccgacgagggctatgtgacgctggtgaacgccaagtacgaccgcaacgaccagctggtggagacgaacgagcgcaccggcatctgggcgtggaagcacccccaccacgacggcactaccacctaccacaagctggcgggcgatatcacctttacggacgtagactttggctatgtgccggaaaagacggtgctgcatgacatcaacctgtatggccgtccggggcagaagatcgcctttgtcggctctaccggcgcgggcaagaccaccatcaccaacctgatcaaccgcttctacgatattcaggagggcaagatccgctacgacggcatcaacatccataagatcaaaaaagccgacctgcgccgctcgctgggcatcgtgctgcaggacacccacctgtttaccggcacggtgatggagaacatccgctatggccggctggaggccaccgatgaggagtgcatcgccgccgcccgccttgccaacgccgatggctttatcaagcgcctgccggagggctacaacactatgctgaccggcgatggtgccaacctctcgcagggacagcgccagctgctggccattgcccgcgcagccgtagcagacccgccggtgctgatcctggacgaggcgacctcctccattgatacccgcaccgaggcgctggtgcagcgcggcatggacggcctgatgtacggccgcaccagctttgtcatcgcccaccgcctgtccaccgtccgcaatgcagactgcatcgtggtgctggagcagggccgcatcatcgagcgcggcagccacgacgagctgatcgccaaaaagggcaagtattaccagctttataccggtaatctggccgagaactaaacaatttcccaccttctcacaaagccgccgcacagccatgccgccgtgcggcggctcttttttacttccatgaagaagcaattctggaaaatccgcagattttccagaattgcaaatataaaaataattttccgctgaagatggccaaagcgcacgcggcggccattcaaaatcgttcactctccggtatacaaatgccccgggctgtgctagaatggagcaaacgagtagaaaaggctggtgagtgtatgcatcctttgacggaatatccccgccccgccatgcgccgggacagctacgagaacctgaacggcccgtggcagtacgccatcactgcctcggcacagcgcccggcgggctgggacggcgagatcttagtgccctacgcgtcggagtgccgcgcctccggggtggggcgcacattgcagcccgggcagtggctgcactaccaccgatattttgcgccgcccgccgggacgggcggacgggtgctgctgcatttcggcgcagtggactacgcctgcgccgtgcaggtaaacggccatctggtgggcggccaccggggcggctactggccctttacgctggatatcactgcgcagctcaacggcaccggccgcaacagcctgtgggtggcggtgcaggaccccaccggccacggtacacaggcgcggggtaagcagactttgcagcccggcgggatgttctacccggcgcagagcggcatctggcagacggtctggctggagcgcgtgccggaaaattacatccagtctctcaccgttacgccggactatgatgcctgcaccgtgaccgtgaaagcccatacctctgcacccggcggtgcggcgaacctgtgggcggtagtgcgcgccgggggtgtgaccattgccgaggactggggcagcgatgaggccggccaggacggtgaggtgacgctgcatattgcagacgagtatttcttcccgtggagcccggacacgccctttttgtacgacctgaccgtgggcaccacgcagggagaggaagaacagttcgacaccgtgcacagctactttgccctgcgcaagtggagctgcgcaccggacgaaaagggcgtgctgcgcttctgcctgaacgacaagcccatcctgctcaacggcctgctggatcagggctactggccggaggggctgtacaccccgccctcggatgcggcggtggagcgggagctgagcgaggtaaaggcgctgggctacaacctgctgcgcaagcatgcaaagatagagccgcagcgctggtactaccactgcgacaagctgggacttgtggtctggcaggatatggtcaacggcggcagtaagtataacctgtggttcgtcacctacctgaccaatgttttgcagccgcttatgcgccgtctgccggacaaagcgcccctgtggggactgctgagccggagcagcgaaagcagccgggaagaataccgccgggagctggaagatacggtacaggcgctgcgctgccacccctgcgtgggctgctgggtgcccttcaacgagggctggggacagtacgatgccgccggggcagtgcagaccatccgcacgctggacgatacccgccttgtggacgaagccagcggctggtacgatcagggcggcggggatgtatactccctgcacaactacttctaccccctgcgggtgcgcccgcagacgcgcgccgtggcgctgagcgagtacggcggcattgcatggcccatgccggggcacgagccgccccgcaagacctacggctacggcacagccaaaagccgggaggagctgaccgcccggtacaaaaaaatgcagctgggcacggtgctgccgcagctgcaaaaggggctttcggcgctggtatacacccagctgaccgacgtggaggacgaagtgaacggcctgtttacctacgaccgcaccgccatcaagccggacgccaacgccgtccgttcggtgaacgccgcccttgccgcggagtttgcaagggtggtaaaataaagcgcctttggcgcgttctgcggagcgctccaaacgcattttcacaaaaggagctgttgcaggaaatgccgtctgccgttgcaatccctcccgtgagaaggcaattctggaaaatccgcagattttccagaattgcaaatataaaaatatattttccgctgaagatggctagagcgcacgcggaggccatttgaaatcgtgctcaccccggtatacaaacgccccgggctgtggtcgcattaccactggtactttgcaccgccgtccgggatggacggtggtttttggtaggatgattttcgtcatttttgacaaaccccgacagcctggcttagagccttctccaaagattttgacacattcttgacagcacttttttgatatattaatatattagtgacagctctcatcttatatggtgaggaagtttcgtacagtattcacaatccgtatttattttttggccccaaaaggagaagaaactatggaactgagcagacgtgattttatgcgtaacactgctgcctttgcggctgttgccagtgtgctgggtaccagcggcattgcctttgcagcggacgccgaccagaattgtctggtcaaggtggacagccccgaccgggcagagctggccaagcgttttaaggcgggcagtgctgccggggtggagtactacgcctacaatccccgccgttacgccccgaccctaaaggggcgcctgcccctgatcgttttcctccacggcgaggacggcgtaggtcccaacggcacccagcttaccgccaacgacggtgctaccttctacatttctgacgaaatgatccggaagaaccccacctacctgtttgcaccccagtgccccggcaagaactggaccgacccggacaccgttacggccctgaagtctgccatcgacagctatgtggctgcccaccgcattgacccggaccgcatttacatcgagggtatgtccatgggcggcaccggtgtctggaacatgatcctgagctacccctactactttgccgcagccatccccatgtgcggcatggtgcctgcccagtggtacaccgtccccggtgcctttgaggccatcaagaacacccctgtgtgggcctaccactgcaaggatgacccggagatgccggaggccgagactgccaaggctgtgcaggccctgaaggatgccggctgctcctgcgtgaagtacgagggctttaccgccggttccataccggagccccacaaggtatgggagcgtgtgtacagcatcggcactccctataactggatgtttacccagtccctgacccggacccagcacggcaagctgaaccccaacatgatgttcagccactacccggtgaagtacaacatcacccgtgtcatggactttggcatggacaccctgtgggtaatggatctgggcaaggaagccctgatcattgacaccgccatgggcggctccggcgcagcagacctctacgcctacctgcgggagaacgtgctgaccaaccctgacgcagagctggatatcctgctgacccacaagcacggcgaccacattctgggcattccctccctgctgaagtccggcaaggtccgccgcacctacatccaccccgatgaccaggagggcctgctctccagcatgcagaagttcttcggcctcaccgccgaggacctgaagctggtgaacatcgtggacggcgacacggtccgcatcggctctgaggagctggaagtggtggatgtgccgggccacaccaagggctctgtggtgttcttctacaaggactacatctttaccggtgacgctgttggctccggcgatctgttcatgatggaggctgccaccgacacctatctgccgggtctggagcacttcatggcagaggtgctgctgcggaacgaggatgtggactatgagctgctgacgggccactgggagaacctgaaccccttcagcgtggagtacctccgccacatgctgatcctggtcaagggcgtcatccggggcgatatccccatcggctactacacccgtaagcccggccgctgggcaggctatctggacgccaacatcttctacccctacgctgtcttcagctatgagaacgagaagtaaggcctgacagtgctgtgtccctgccccactgctccaatcaaaaacagacccggcaagcccaaaaggcctgccgggtctgttttatagcgctataaaaaacggggtcaggaaaaatctcgaacccgtttttgcaatttttatgcagttatcagctgttggcgctggtggcgtttacgatcttggaagcgggcagcttgctcatggcagagctgctcagggtgctgtccagctgggcaccgtaggcggcaagggcatcgttcagctcctcgcccttcatgtcgctcaaaatctggctgcgcagagcatccagcgtggaaacgctcaacggatccagacggacggccagcatcatggcgtagccggtgtactggatggcggctgcctgtccgtaggcaaggccgcgcagggtgtcggcggcaccctcctgcgtaaaggcatcggtcaggtcgctctcgcccagcaggtcggtctgcagggtgctggtggagggaacctctgcatccagcacggcgcaaatatcggtcagtgcgctgcttgcgatgctgttaaaggcggccatctggctggaggcgtcctccggggcggcggcgttgtagctgtccgcagccttctgggcaagggagagcatctcggccttctggtcatcgctggcaaaggcgaaggtgctggtgttgtacaggggcacggtgatgaagccgatctcgtacatggtactgtccagatgctcggtcagctcgccgtcctccacaggggtctcgccgtccttgccgtagacaagatccagcagcaggacctgcttgtactgcagctgctggaacagcttcaaagtctccagcccgatgccgttggcagtataggcatcgccgtagttatccatcagctgctgggcgtagctgtcggcggcggacttctgctcctcggtcagctggccgcccagctcggtaaagcgggcatccacagcggcaagggtctgcaaggtctcaagggtcttttgcgccacatagtcctttaccacggtggtttcgccggtgtcggcatcggtggtgatggtggccttgaggaaggaattcaccttgctggtgtcctgctcagagcccgcaagctgtgcagcctgctggtaggcatcgtactgcgccagcaggtacaggccgctggtcacctcaaaatcgccgatcttgcccacggtgtccggggtggagagtgcgcagcccacaaggctgacggtcagtgcaagtgcgcataccagcgcaagcagtttctttttcatgctttttgctccttattgttcaaaatggcatccatggctttcaggatgttttgcagcagttccagcggcttttcgtccggctgtaataccaccgagagatagggctttgtgcccgccccggcagtgacacggccattaaaagcttgcagcaggccgcgtatcatggcaaggtccagcgtttccagattcaggatcagggtatccttcttctgggtcacttcgtacacgcccacggcagcggcctgtacgcggacaagggaaacgttgaccagatcgctcaccgagggcggcgggtcgccgtagcggtcgatgagctcgtccagcacatcggcggcgtcctccggggtctggatggcggcaatgcgcttgtaggcttcgatgcggcccgcgccgtccgggatatacttttccgggataaaggcgtccacccgcaggtccacaagacaatcgctcttgtcccgctggacgggctcgccccgcgcccgggcaatggcctgtcccagcattttaacgtagaggtcgtagcccacggcttccatgtggccgtgctggctgtgccccaacagactgcccgcaccgcgaatttgcagatcccgcatggcgatgcggaagccggagccgaaggcggtaaactcccggatggcagaaagccgcttctgggcgatatcggtcagggtcttgtcccggcggaaggtgaagtaggcgtaggccttgcggccggagcgccccacccgcccacgaatctggtacagctgcgccagacccatgcggtcggcgtcctcaatgatgagggtgttgcagttgcgcacatcaatgccggtctcaatgagggtggtgcagaccagaatgtcgatctcgccgttcagcaggtgctgccatacggggttcagctcttcttcggtcatcttgccgtgggcgatgcccacccgcgcccccggcaccatctggctgacatgggcggcgcaggcttcaatgttgtccacccggttgtgcaggtagtacacctgcccgccccgggcaagctccttcttcatggcttcggcaaggatgacatcgttatattccagcacaaaggtctccaccggctggcgctcgatgggcggctgctcgatggtggaaagatcccggatgccgctcattgccatgttcagggtgcgggggatgggggtagccgacagggtgagcatatccaccccgatgaagttctccttcagcttttccttgtgctttacgccgaagcgctgttcctcgtcgatgatgacaagaccgaggtcgtggaactttacgtctttagagagcagccggtgggtgcccaccacgatatccacgctgccggcctgtaagccgcgtaacgtctccttttgctgctttgcggtgcggaagcgggacagcatcccgatcttcaccgggaaagcctccatgcgggagagcagggtgttgtagtgctgccacgccagcagggtggttggtgccagcagggcgcattgcttgccgcccatgatgcacttgaaggcggcgcgcagcgccacctcggtcttgcccacgcccacatcgccgcagagcagccgatccatggggtagcccttttccatgtcctgcttgatttcggcggtggcgtgcagctggtcgtcggtctcgtcgtagtcaaagcgggtctcaaagtcccgctgccagtcgccgtccggcgggaaggcgtagcccgtggcctgacggcggcgggcgtaaagctcgatcagctcctgcgccatctcctcggtggcctttttcaccttggcgcgggtgcgctgccactcggtgccgcccagctttgccagctttaccttttcctcgtcgccgggggcggtgtagcggctgagcagatccagctgggtcaccggcacatacagcacgtccgagccggaatactgcaccttgaggtagtccttggtagcgccctgcacttccagccgctggataccggcgtacatcccgatgccgtggctttggtgcaccacatagtccccgggcttgatatccgaaaggctggacagggcgtttttattcttcttgcgctttttggcttcggcggcggcttcctcgtccagcccgtggcggcggctggaaagcaccgctgcgtgggcaaaggggaaggtacacccggcggtcaggtgtccgggcagcacctgcaaaatgcccttggcggggcgcacatcccggctcatgctcacggaatagcccttgtcggcaaggtcgcgggtcagggcagctgcgcccttgggcgtaccggcaaacagtgtaacggcgtagccttgagtgatgagcgggtctaagtcctcccgcagggaggcaaggtcgccgttccagttgggggcggcaaaggcttcggcgttgatgagatctttcagcttgaactcgttcatcccgcgcaggaaattctcacacagcagggtgctgtggttctgggcggcaatgacaagatcgtccatggtctggtacagcacgtccagcccggggcagagcacgccctcttccagcagtccggtcagctcctcgctgcggcggaactcggtggctttctgggaatcccggatgccgcccacttcgtccagaatgaacagcggcgcgtccagatgatccagcagcgtggcgggggcagggtagcggatgccgtaatatttatccatggcctccggcatcatgccggaatccagctgggaaaggtcggcttcggtggccttttccagcgcggtgcggtgcttgccgcgcgcctttttgatggcgctgcgcagcgcttcggcggtctcggcggtgctgccgaacagcacctcgcgggcaggggagaggtatattttttccagtgcgccgtcccgccgctgggtcagcaggtcaaaggaggacatggaatcgatctcgtcgtcccagtattccacgcgggcgggctggcgcatatccggcgcgtagatatccacgatatcgccgcgcacgctgaactgccccgggccgtccacctgactgcggcgcacatacccggcggcaaacagccgcgccaccagcgcttcgcggttatacaccatgccgggctttaaggtaagggtgttctggatgaattctgcccggggcacggtgtactgcaaaagggcttcggcgggcacgcagacggcctgcagccgcccgcctgccagtgcgcccagcaccgaaaggcggcggtactcgtactcgcggcctgcaccctccaccgggcgcagcataaagtcccggggcgggaacactgcagcagtaagccccagcgccttgaggtcgtccgcaaagtgggtggcttcggcttcgccgggggtcacgatgcagagcacccggtcaaggtctttttgcagggcggcatacagcagcgcccggcctgcgggcggcagaccgaacagcgccgccggccctgccgagccaaagcttgcggcgaccttctgatattccggtgtggctttgagtaaggcttcgtacatggaaaaccctcctttcctgtcaggatgcgggagaatgatttttacccgttatacttgctctgcgccagactgagcttaccgtccatgataagctttgcggcggcttcaaggtcggggtagcggtcggtgatggccttagcatcctccggcgggaacttgcccagaacccatgcggcaaggtcgtagtccgggtggggctttgcgccgatgccgatgcggatgcgggggaagccgtcgccgcccagccgggcgatgatgctcttcaggccgttgtggccgcctgccgagccggagggacggatgcgcagcttgccgggggcttgtgtgatgtcatcgcacagcaccagcacatggtcggcgggaatcttgaaaaagcccgccataggggcgatggaatcgccggagaggttcatgtaggtcaggggcttcagcagcaccaccttgtggccgtccacctcgccctgtccccacagaccttgaaactttgtcttgcccacagagatgttccacttatcggccagcgcgtccagcgcggcaaaaccggcgttgtggcgggtgccatcgtactttgcttcgggattgcccagcccggcaatgagccagatatcgttttcattcatgatgtgataataccttttcctgataatagtgtgatacaacatctaagtataacatacgcgcgcgcaaaaagatatacattataagcaaaaaatgcccccgtgccgcagagcacaggggcaaaagggcttgttacaggttcagcgtgatggcagcggccttccaccggccgtcctccttcaccatggtgatggtaccggatacctgcgcggcggcggtgctgtccgtggcggtcagcagggtggcagaaaagtcgtagcagttttctgccccggcgcgctttttcagggtgaggtcggcgggcaccagctgatcgccggactgccctgccagcgcagtgatgcgggtgggcaggcggttcgccatgactttgttcaggcaatcggcagtcatggcatcgcccagctgcgcctgaagaaaggcgtacaggccatcagtatctaccgcaacaagccccggttcactgccggagggcgcggcggcgtccacggcctgctccacggcagaggagcaggagagcagctgctgcaccacgaactccgcctgttttttggcggggtcgctgcgcagacgggtcagggcgaacacggcggcaacagccgcgaagaaaaggacaaggctcagcgcctgcttgcgaaaactttcagatttcatacgcggctcctttccggcagagggttacttgctctgctcattttccagcttctgctttttggcgatgtaggcttccatcttgggttctgcccagccgtccagattggtctggcgctcccgggcgatgcccagtgcctgcgcgggcacatccttggtgatggtgctgccggcggcggtgtaggcaccatcgcccaccttgaccggagccacaaggttggtgttgcagccgatgaagcagtaatcgccgatctgggtgcggaacttatccttgccgtcatagttgcaggtgacggtgccgcagccgaagttgcagtacttgcccacatcgctgtcgccgatgtaggtcaggtggctcacggtgttgccgcgggcaaagttggagttcttggtctccacataggcgcccagatgcacgccgtagtcggtgacggtgttcacccgcacatgggtgaaggggccgatgttgttgtgggggccgatatggctgccgtagatctggctggcgttcacggtggtgccttcgtccacggtgctgtccttgatgagggtgttggggccgatgacgcagcccgcgccgatgaccgtcttgccccgcaggatggtgcctgcaaggatcacagcacccggggcaatgaccacctccgggtcgatctgcacggtgcggctgttgatgacaacgccgtttgcaatgtgctgcacaaggatgtcctcgcgggcagcttcggcagcgtccagctgtgccagagcagcggcgcgggcctgttcagaaataggattcggcatgaaaaaatctcccttcccaccaaagcgcgcggcggaagagagacagaaaaggcgaccggaaaattgttgcctgtccgccccagcaccccgctgcggaaagctttgttccgacaaaatagaatttgaaaagttacaaggatagaaagttgtatccaacaggacgagaaatcgcgtgtataaacaaaaaacctctcgaactttctcccattctatactaccttaaaacttggagaatttcaagagatttgcataaaaaataacagacaaattcgggattttgcatggtggaaaggaatggattttctggtataatagtttagcattcacaaaacaatgttcatcgtacgtaaaagacaaggcaaacgatgagaccacggctgctatgccgccggtcacgaatgggaggtaaacaacgcatgagcaaaaagtatctgtactacttcagcgaaggcaatgacgctttcggcggtgacaaggtcaccatgaagaacacgctgggcggcaagggtgccggtctggccgagatgaccgcagccggtatgccggtgccgcagggcttcaccatcaccaccgacgcctgcacccagtactacgcagacggccgtcagatcaatgacgacatcactgctgacatttttgagcacctcaagggtctggaagagatcaccggcaagaagttcggcgacaacaccaaccccctgctggtctccgtccgttccggcgcacgtcagtccatgcccggcatgatggacaccatcctgaacctgggcctgaacgatgaggctgttgagggtctggcaaagaagaccggcaacgcccgttttgcatacgactgctaccgccgctttgtgcagatgttcgccgacgtcgttatgatggtcccgaagagcctgttcgaggtcgagatcgacaagatgaaggaagccaagggcgtcaagaacgacgttgacctgactgctgacgacctgaaggaactggtcggcaccttcaagaagatctacgaggagaacgaaggccgtcccttcccgcaggatccccgtgatcagctgatcgaggctgtcaaggccgtgttccgcagctgggataacccccgtgcaaacgtctaccgtaagatgaacgagatcccctacgagtggggcaccgctgtcaacgtgcagcagatggcctttggtaactccggcgaccgttccggcaccggcgttgcattcacccgtgaccccgccaccggcgctaagaagctgatgggcgagtacctgatcaatgcacagggcgaggacgttgttgccggcgtgcgcactccttctcccatcagccacctgaaggatcagatgcctgaggtgtacgatcagttcgtcgagatcgctacccgtctggagaactacttccgcgatatgcaggatatggagttcaccatcgaggacggccacctgtatatgctgcagacccgtaacggcaagcgtaccgcacaggctgctctgcagatcgcctgcgatctggtggacgagggcatgatcaccgagcaggaggctgtcctgcgcgtggagcccaagcagctggataccctgctgcatccccagttcgatgctgctgccctgaaggctgcagaggtcgtcggcaagggtctggcagcttctcccggttctgcctgcggtcagatcgtctttactgctgaagaggcagaggagatggtcaagtccggcaagatgaagaaggtcgttctggtgcgtctggagaccagccccgaggatatcgtgggtatgcaggtctctcagggcatcctgactgtccgcggcggcatgaccagccacgcagccgttgttgcccgtggtatgggcacctgctgtgtctccggctgcggcaatgacaacgaggtcaagatcgatgaggaggcaaagaccttcgagatcaacggccacaagttcgtcgagggcgactggatctccatcgacggctccaccggcaacatctacggcgagcaggtcgctaccgtggccgctaccggcaacaagaacttcaaccgcttcatgggctgggcagacgcagctcgtcagctgctggtcatgaccaacgccgacaacccgcgcgacgcacagcaggcagtggatctgggtgctgagggtatcggcctgtgccgtaccgagcatatgttcttcgctgaggaccgcatcaaggctgtccgcgagatgatctgcgcacgcaccgtggaagagcgcgaggctgctctggccaaggtcgagccgttccagcagggcgacttcgaggcgatgtaccgcatcatgggtgagcgcccgatgaccatccgttatctggatccgcccctgcacgagttcctgcccaccaaggacgaggacatcaaggagctggctgccgacatgggcatgacctacgaagacctgaagaacgtggttgcttctctgcatgagttcaaccccatgatgggtcaccgcggctgccgtctggctgttacctaccccgagatcgctgctatgcagacccgcgccgtgatcaaggctgctctgaacgtctctgctgagaccggccatgtgatcaccccgcacatcatgatcccgctggtcggcgaggtcaaggagctgaagttcgtcaaggacgttgtggtcaaggttgctgacgagctgatcgctgctgctggcgttgacatgaagtatcaggtcggtaccatgatcgagatcccccgtgcagccctgactgccggcgagatcgctaaggaagctgaattcttcagcttcggcaccaacgacctgacccagatgaccttcggcttcagccgtgatgacgctgccaagttcctgggcgcatactacgagaacaagatctacgagagcgatccgttccagcatctggatcagatcggtgtcggcaagctggtcaagatggctgctcacgacggccgcgagacccgccccgatctgggtctgggcatctgcggcgagcacggcggcgaccccacgagcgtggagttctgccacaacgttggtctggactacgtcagctgctctcccttccgtgtgcctatcgcacgtctggctgctgcccaggctgctatcaaaaatcccagaaagtaagattgttgcatgaagatgcactgatcgtgcaaaacatgggaagataagcgtatgataaaccctccccggtgaaactgaatggttttgccggggagggttttggttgagtgcttgagcgattcacaaccaccagcttagctggtggtttttcttcactcaagttcttaaaaagaacaccgaggactctctccccaaaatgggaaagatcctcggtgttttctatttaacgggtctgcgatttttccttggtgtcttttttctcggcgaagaacaactctacattcttctgtgtgttttttttaattcctgcatttcatcccgtgccttgcggtacttcggataggcagctttcttttgagaaagcagtgcggagtattcggtatccagttcttttacctttggcaactttttcaaactcgcttcgtcaaaagcggcttttgccgccttgtgtagcgtgatttgttcccggtgttcttccaaaaacttcttgctgtaggctgggtctgcccagaccacggcgtttgcgttcgatgaggtcgatgtcctccagctcccggagcagtttgaccgccttgtgttcggcgcagcagagggatgtcctgaccacatccatatgttgataagtttttctccaaagtatagcatttcttacgtcatgggctatcttaaaggaaaaagtagcctgatgattttcgacagacatgcgaatttgaagtacaagtatggcaatcggcatttctgggccagaggatatttcgtggatacagtagggaagaacaaaaagaaaatccaagagtatatcagaaatcagctgcaacaggaccagattgccgatcagctgagccttaaggaattcgtggacccgtttacgggtagcaaggaaaccaaggcgtaaataaaagaccccttgagggggttgccacgagaaaggaatgcagttggcagacccattcgtgaccccttaaggggttttgctagtattatgcccttctagggcttactcaagccaccggctcagccagtggttttgactgctgtgagctaggaaatgatcctggacggaggttcagggctgcgatgtgcaaaccggaaatgctgccgttgcattaagaatcggatctggaagtgcgctcaaagtagaagtagaagcagatgttcagcacgattccgacggcggtggacgtaggggcggccagaccgatcatagtcaggctcgcattgggctggatgctcatgaagtaggccatgggcaggcgtaccagcaaggtctgcaccagaccctgcaccatgacccagacggttttgttgttgccgttgaaataacccaccatgctgaacagcacagcagtggcgatggtctctggcgcgaagcctttcagataggcgaaagcgtttacgaacacggcgcagccaaaggcgaggccgatgccaatgccggtgaacatggactgtctggcacgttttttgctgcctgcaccgatattctgcgagacaaacgctgccatcgactgcatcagtgcgctggggatcggcatggcaaagttgacgatcttgcaggccacaccgtaaccggaagatgcttccaacccaagacggttgacgaaggcgcagagtgcaaggaaagagagctgggtcagaaactcctgcagagccagcggcagaccgatgctgaggaatttgcggcactggggattcaggcggaaatcagccttgcaaagtttgaacggcaggtgctttttcagcagcatgatcactgcgcataccacgctgacagcctgcgctgccaatgtggcaatggctgcaccggcggcatccagatgcagcccggccaccagaaacagatcgccgaaaacattcacgatgcaggctacaagcacaaacagcaggggcgactagctgtcgcctaggccgcggaagatcgcggccagcaggttataggccacgataaaaaagatgccggcaccgcagatgcggacataaccggaagtcaggccgagggcttcttccggggcctgcatcaggacggaaatgggccgcgcaaacccgaccagcacaacgaacagcacagccgagatcagcgcgaatacaacaatagagccaccgatgacctgcccgatgtactgcggccgcttttcgcccagataccgggcgatgagcacggtgatgcccattgcaaactgtgttaccacgaaggtgacaaggttcagcacctggctgccggtggacacggccgaaaggccagaggttgagccgaagtgtccaaccacaagcaggtctaccgcgccgtaagcggcctgcagcaccagtgcacccagaacgggcagcataaaaagcaccagcttttgcaggatgctgccctgcgtaaaatcagatttatcacttttcatggacgtttctcctttcacacatgacctgatagaatttttcaatggtccggatggtacactctgcgtctgcctccgggatatcgtccagacagggggcaaggctctggaaatagtcgctgtcgtatttttcgagagcagcctgcctgcgtctgtgagcagcagataggtcacccggccatcctcggccgaaacctgcttttgcaggtagcccttgcgctccatctcctttacggtgcgggtcacaccggggcggggcaggttcagcgcatcgctcaggtcggagactctggcccgtacgccctttgcttccagcctctggatgacatccagatactgaatgtaagaggacgtcacaccatcgggcaggggaggcagcaggtcccgggcacgctttgccagatagcaggtatccatcagctgcttgataagctcgatcgtcataaaaagtcctttctgaaagttgcttatgataattatctttggtaagatataatgacacgaaaggatttgtcaagagcttttttacaggcaggcccggatgcaaaaaacgagatgtagcaccttccaagacagaaaaggtgctgcatctcgtttttatatgggggaaaggaaagaatggcaggcagaaagatcattcggcgcacaggccgccaaggatctggatgaaatccggataactggaagcggaagccagctgttccaatgttttgtagtcgctgcatacgcggggaaggtaggagaagatgtcggaaaaatccgacagatcgctcttggaaacgcagatcatgaaaatgatgcgcacgctgctggtgccccagctcagcggtttgcgcagcagggacacggcgatggccgagcgggcagcgcggcaatcagacgggtgcggaatggcgatcatgccaaaattggtgggggagatctgctcccgctccagcgtactttcgataaattcttgcggtacgatgccgcgggcgcacatctggccgccgatggtgcggatggcgctttcgcggtcggcgtagtctgcaccgggggtgaacaggtcggcatcgatcagcgtttgcagcaggctgatcaggcgttctttttcacgcgctgccttcaggcggtggatcacgtcgctgatggcctggcggtcattgctgctgataaaattggagatgagcaccacaggcggctctgcggtgagcggaagggtggagaggatcatatcacacttcagcccggccagttcgtgcggggcggtaacgaccgattcgatggtcagatcgtccgaaaaatagctctgcagccggtcgaactggcgatggtcgtaggagtaatattgcgggcagagcaataccgcacacagcttgccgcggcggttatagatgtcctggatgcgtgcaccgatgtgaagcgcaatgtaggcgatctcatcctcacacagctgcacatgctcctggtggttgatcaggttggagatatagaccgcaatgtcgtagataatgggcgacattgctttgatgctgtgcagcagggggttgtggaccgacacattctggcggatgcgcacaagcatattatcaatgtgcagtgcaaacggaatgaagaaatcaatgtcggtcaggtcgatgtcatacacctgcttcacagcctgaacgatggagtctaccaagcgcatcgtgctggggtggatggaaagcgtggcacggcttggcagcgatacatcctggttgcgcacggcgcgtgtcatgagcaggagggtgaactggtacttgttgctgcgggtgaaaacgatgccgtattcccgctcaagttctgtgcagatgctgtcgatgatcgacacaaaatgccggttcagttcaatgaggtcggtggagacctcgtaccgcggggcattgggggcggtgccaagctgatccatcgtgatgagcatgtgcagcaggagattggtcagagagtattcgtcgataaaaaagtgctggctgttcaggcaggcaaggatatcgctgcggatcttctggatatcgtagcgggggaagatggcatggagcgtctccatgctcacaagcgtgtgctgcgcttcgttgtagatcaggtggatcatgagacgctttttgtctttttcacttccggaaataaacagggtgttgtttttggtgcgcagcgaaagatgatattctgcgatctcatgccggatgagcttgacctcgttctgcagcgttacctccgagatgaacagcgaagcggccagctcgtccagatccatcggctcgcttcgggaaagcagggcgcggaggatatagcgggaacgttcctgctgggaggacggcacctgcgcagaaggagagctttcttcgaaaatctgcttcaaaagtttcacctggccgcggccgacctgcaggcaggcgggatatgcgtcctgaaccgaacgcagatggttgcggatggtgcgcggtgtgacggaaaaaaaggcggccatatcctctatggcctgcacattgccgtgctggttcagatactggatgacatcttttgttgaaagcatgggactgcagacctcttttttgtgatcgggaatctctcggttcagaaatccttaatattttattctattatataatacccttttcgcaaaaaaaagacctggaatttccaaaataacggaaaaaacgcagactttttttccggatcctgccgggcgataatagagccaagaaaagggccgcggcgcagcggccctgcttctcaaaacacctcatgaaaggagaaattatcatgaaagcgtacaagatcttactttgctgcggcgcaggtatgagttctggcttcctggcacaggcggcacaaaaggcggccaacacaaaggcccccggcaccaaggtggctgccaagagccagagcctggtagaagatgtgatcgaggattacgatctgctgctcatcggcccgcacttcgcttcccacaaggatgagtttgacgaactcgcaggccagtacggcatcccggtggaagtcattccgcagtctgtctatggctcgctggatggcaacggcctgatcgattttgcgttggatgttctgaataagagctgacaggaggaagatgttatgagtaaaaaacccatgcagaaattcatggattggctgcagtataaagtgaccccggcggtgcagaaatttaccgagcggccctgggtgcacggcttctccgcaggcatcgtcaagtgcttgcccttcatccttaccggctgcctgatcttcttctacaatgtcgtgcagccctacttccccaacatcctgcccaacctgagcgcggtttccaactatacgttcagcatgctttcgctgctggtggcgtttatgatggtctaccaggaaatgggctctctgaaacatcgtaattatcaggtggtcggcggcctgaccggcatctgcgcctacatcctggcgatgaagggcaccaccgtggacggcgtctactccgttacctggaaccgcttcggccccaccggtatcgtggttgcgatctgcatcggcctgtatgtgtccatcatcttccacctgatcgcaaagctgaacctgttcaagaacaacaacaccatccctgagtttgtgcaggagtggatcaagaacatcatccccatcttcctgtccatcctgctgctcaagatcgtgatcatcgatctggatgtggatctgtatcccatcgtgctcaagctgtttgcacccatcaatgccattgcacagacctatccgggcttcatcctgctcaacctgttctgctgcttcttctattctctgggcatctctggctggacctggtctggcccccgcaacgccatcttcatccccgcacaggctgctaatgtggctgctgtggcagccggcggcaccgcaatgtacctgaccacttccgaagtctgcaacggtatcgcactgatctgcctaggcggcatgggctgcaccctggcactgaacatctggtgcctgttctccaagagcaagcgcctgaagacgctgggccgtgtctgcattgctcccgcgatcttcaacatcaacgagcccatcctgttcggcaccccgatcgtctttaaccccatcctcatgatgcccatgtggatctgcaccactgtgaacgccaccatcgtgtggatcgtgatgcgcaccggcctgctggccattcccaccattgagctggcaatggtcgcaaccattcctgcaccgttctccaccgtgatgttcaccggcgatatgcgtggcgtaatctggtgggctgtgtgcctggcagtggatctgctgatctggtatccattcttcaagacctacgaaaagcaggaagtcgagaaggaggccgccgaggctctggcaaaggcataaaccgaaaattcgataaaattaagagggaaaatacaacatatgagcgataaaatggtagaggtcgcaatgggcattatcatcaatgccggcgacgcaaggacttgtgctgccgatgcgatgcaggccgagctgcgaggagaccgcgctgcagccgatgcaaagctgaaggaagccgacgaagcaatcaaaaaggcgcacaatgcgcagaccgatgtgatccaggacgagtgccggggcaaccccacggagctgtcgctgctgtttatgcatgcacaggacaccgttatgaccatcatttcggaggtaagcatgatccgcctgatgatacagatgaaccgtaacctggaggataagatcaatggaaatcgtaactagtttcccggaagggttcctgtggggagccgcaaccagcgcctaccagtgcgagggtgccgctgagggttatggcaaaaaggataaccagcaggacgtgatcaaccgtgagatccacgatgaatacggctatgcggatgccagcgttgccagcgaccattaccatcactacaaagaggacgttgccctgatggcagaaatggggttcagctcctatcgcttctccatcaactgggcacgcgtcctgcccgatggtgtgggcgaacccaacccggaaggcgtggaattctaccacaaccttctgcacgagctgcacgcccataacatcgagccggtggtcaccatgtggcactacgacctgccgatggcactggtgaacaagtacggcggctggggcagccgccagatcgtggatgactttgagtattatgcccgcttcattctcaacgagtacaaggacgaggtcaagtactggctcaccatcaacgagcagagcatcgtggtcaactatatcgaccgcaagaataagctgaccaacgagcagaaatttgatccgaagttccgctaccaggcaaaccactacatgaatcttgctcacgcaagagcggccatcgcggttcacgagatcgtgcccggcggccagtgcggtgcggcactggatatggcaccctattacccccacacctgcgaccccaaggatatcctagctgcaaaaaatgcatccaatttcaaaaactatttctacatggatgcctacatccgcggcgagtacaccgaatcggttctggcatatctcaagcgccaggggctgatgttcgatatccagcccggcgatatggaactgatcaaaaaaggctccgagtgcttcgacttcctgggcatcaactattatcagagcgcctgcgtcaaggcacctaccccgggcgccgcacgccgctccaagcagaacaacaagatcggcaagggcggccatgtggtgtacgaagtgcagccagatctgtttgaaggctgcaagaacgagttcattggtgatacggacttctccatgcccatcgacccggtcggcctggagtatgtgctggaggacatcaacgatcgctaccacatcccggtaatgatctgcgaaaacggctttggtgcttatgataagctggaaaaagacggttctatccatgatccttaccgcattgagtacatccgtgagcacatcaaggccatgaaggctgccattgcaaacggcgtgaagctgctgggctacaatccctggtctgccttcgacctgctctccacgagcaacggcatcgccaaacgctatggttttgtgtatgtggatcgcaccgatgacgacgtgaaggaatgtaagcgctaccgcaaggattccttctactggtataagaacgtcattgcaaccaacggcaaaaaccttgagtaagagctttctttcatcttagcagattcctcctttacgctaaaagggccgctgcatcgtgcagcggcccatttgcattggatagcttgagcgagcgacaaccaccagctatgctggtggagtaaaaaaagctttagccctagacaaaaagaaacctcccggtagaatagagtgtgggtttgccaaccacattctaggaacagggaggtttatctttgaaatgaaagataacaaagacgtagatcgtttaagccatacagcatggagatgtcaataccgtgtttgcaccaaaataccggagaatggtaatttacgaccagattaaaaaagatatcggtcagatactccgccaactgtgtgaacagaaagaaattgaaattatcgaggcggaagcatgtcctgaccacatccatatgttgataagtttttctccaaagtatagcatttcttacgtcatgggctatctcaaaggaaaaagtagcctgatgattttcgacagacatgcgaatttgaagtacaagtatggcaatcggcatttctgggccagaggatatttcgtggatacagtacggtggatgccctgtcctatacccgtgaactgaaggcaatgggggtcaacgtgtttttcatcaatgatggcatcaatacagcgaccaacgatggagaactccgtctgacgatcatgtcctctatggcgcaggacgaaagtcgaaagatttcggagcgagtaaaggctggacaaaaaatcagccgggaaaaacatgttttatatggcagtggaaacattttgggataccgcagggagaacggaacctacgttccggacccagatcaggccgaaacggtgaggttgatttttcagatgtattcggatggcgaaaaggggcttactcaaatcgtgaacgagttatatcggctgggacggctggatgcaggtggtcatgtatcatgggacgcttccaaagtgagccgcgttttgcataatgcgacctataaaggctgcatctgctataacaaatcccacagtgatggctatctgacgcagaaacgtataaaaaatccggatgagagcagctatgtctatgtgaaaggggattttgagtcgttggtatcagaagagatgtgggacagatgtcagcagattctgctgtcccgctctgcacgggtcatcaacgagaacggcaaaaagcacaaatatatgcggaatacgccaaaatctgtctggacagcaaagctgcggtgcagctgcggagctggatttatccagttcaaatggagagtaaaccgtgatggggcagttgttcacggatttcagtgctaccgccgtacacgcaggccaagcatcagctacttacaggagcatggtctggatttgggcatcagctgccagatcaaagccatcagtgaatggaagctggatctgatggcattcaaggtgttccagaatctgacgtttgataaaggtaaaaccgtcaaagaggtataccggattctgaaccgctgcatggcagaggaaaagactgtgcgcatttccaaaaaggcaatgctggaaaacagtatcgccaaacagaaagaacggctgggcaggtatattgacctgtgcgctgacggagttatcacgaagcaggaactggtggatcgccgcaagggactggatgcgcggatcgctgagttgcaatcccagtacgaaagcatcgaacaggaggacgaacgcagtgggagcattgatatgaagctgatttcccagaagctggatgagtggcagaaagcggtcaaaacggatgtcagcaggaaacttattaacagctgcgtagcacagattacgcctgtaagcaatgaggaatttcggtgggtgctggatttccaactgtccgaggtgaaaggcatcaatatgacatcctgtacgatggacggtttcatggagctggctcgtttcgtaattccatttgaagatgccaaagcgttcaaggcttcacggaaccagaaaatccatagaagggattggaataatctcaccgtagtagtaggaatccgctcaaaaatctgtccataaggtcatgtgttgaatgtgccgaatgtgtcaaaagattcggaaatccttttactatatggcatattttgcctgttatatggcctgaaaagcaggatttgcacgattgaggtttacggaagatcgacacaaccgacacacccggcacaggccgaagcgtattttgtagaatttcatttatatattatcttattgaaaagacctgaggaaaagttttgcactgtcctcaggtcattcctttttaccgcaaaatcgtgaaaccgcttacagtcagctggtaaaatttctgaaagccagaaagcctataagtgaatggtcaaagccatttcttcagcaggcatggcggttgttttgtacgccggacaaaacaggggcctatcgggaatatgttggggtctatgaatactggctcaagcattggatgaagaagtgattttgtgctaagtgttaggctggtacggagacatcaaaatccccggaaaggatatgacaaaacttttgccgtatctgtgcgcaaatgataaccctgtgattacaattgaatctgctcagtgataagcagtccctccgctttcagccagaagaaagtggagggatttttgtcggtaggctttttcaacgatgagctggttggatttttgcgtcttgttttgagggcacaatgagggtacaataagcgaaagtagtgtggatttgatagaaaacgatcaaatacattaccttcaacaaccttgaatagccatgtttcatcaatgcacacgtgcaacttagacatactttttcgtcctctctctgcaaaaatgagcataatgtataaaccgttatagcactttccgagggataatcaatatcgggttcgtaatatttcttattcgccttagaatacaagaatgattcctgctacgcagaaggaagaagttcgtctcaggctaaagaaacaaatgctactaacactactaatgggttttgacagtcgaggaagggaagcacaatgactgtggacgaattgagtgtcaaactgcctcatctaaaatgtgattcggatgttcaagaactcggagttaaataagatggcggaaggatgatatggtgtggagctgtggatttctggatttagcaagtggtagagtgaaaagttcacatgggcgtgattgattcagtctgtgtgatgtggtaatataagaaaaaagaaaggcggtgagtctgtggcagaaaaagacgcatctgaaaagattctggaatcctacaatgatgtattctccgatattgtaaatgtactgctattcaacggaaggcaagttttaggtgcagacgaattggaagatcaggctccgcgcacctattataaagcagatggcagactccatgaaattgaacgtgatgttgccaaacgatggaagaatggtaatatccgggtggcgtgtatcggatttgagaaccaaacagcttctgacccggacatgccgctccgagtgataggttatgatggtgcagagtatcgggcgtagcttctgggagataatgatacagggagtcgctacccagtcgtgacgctggttctctattttggacatgaaaaaccgtggagtgggccgctttctctgaaagaacgattgaatgtcccaaaagagtttgagccatacgtcaacgattataaaatcaacctgttccagattgcgtatctgactcgtgagcaggtagaattgttccaaagcgatttcaaggtcgttgcagactactttgtacagaaaagagagaatggcgactatgtgccaagctcacaggatttgactcatgtgcaggaaacgcttcagttgttaagcatcatgacgaatgaccaccgatttgaagacgcatacaataccagtaccgatgacaggaaaggaggcccacgcaatatgtgtgatgtgcttgataaagtggaaaacagaggcattgaaaaaggcatcgtgaaaggcgagagccgcggagaaaacaaaatggctttactggtaaagaagctccttgaccagaatcgcattgacgatgtaaagagggcttccgaagatgaaaagagccgtgcggagttgatgaaagagcttggaatcaactgaaaaattgaaaaccgcgatgtgtcgttattcccaacgctctgtaattttggcacccgcccaggctgcgattaagtctccccggaaataaaatctgataggacaaagaagaaaaaaagctcttggcttctgtaatggaggccaagagcttttttgtatcttgttttgtaagcggaaagaggttccaataatagaaaagaaagcgtacatcggtcgaataaggtggtggatttatgaatggtttaaagttaaaagaagaagtatttatgcacaaaaaatgatcgataaaattgtaaaaaaggcgaatggaatctctatgaattttatgttaacatcttattacaacacgtgattcctcggaagcgtcagttgtacttgtgaacaaaggatagtgctcggtagagtgtctatacctgcaggtataattatgactgcagtccgaggctttttctttatccgaaacggagagggtgggtgctatgcgaattgttcggaaaatcaataacagtgccgctgttgctcaggactcccgcggaaaggaactgatcgtgattggtaagggcatcgggtttccggcggttccatacgaactgacggatatgtcgcggatagaccgcacgttttacgatatcgacccgcgttattttgagatgatcagtactcttccgcaggagattcttctggcgagtgccgacattacagaagatgcgcaggtcgtactgaatacgacccttaactccaacctgccgctgacactggccgaccacctgaactttgcggtggagcgctttcgcagcgggttgaacctgacgatccccattgcctatgatatccgtcatctgtaccccaatgagtttgatctgggcgtaaaagcattggatatcctgaaggaatacacgggggtctcacttccggattccgaagcggtcagcattgcaatgcatttgatcaatgctgaaatcgaaaacagcgagatccattccctcgtaaaggcgttggagattcaggaaggcgtggagtccattgtggagcgggaaatgaatctgaaactggataaggacagctacagttactaccggttcacgatgcatatccgctatctcattcaacggctgatgagcggtactcagagcgaaacggggagtggcagcatggtaaagatgctggccaatgattaccctaaaacatatatctgtgctaaaaagattgcggctttcttgcaaaagcaggagaattggtgctgtaatgatgaggagcttctctatttgatgttgcatatcaaccgcgtctgccagaaaaatacataatcagcttccgttgcttggagcggcactcgccatttgcgggacgtgatccggggacagagcgcatccgacctgaaaacgcctgcgttttcaggtggtttgaaggcgctttgtgcccggatcttttattacatattgaatgaacagcggtgcagggcccgcatcgtttttcagataaaaaatcaggaggattagccatgaaacaggatgcattctttcaaactatcatacatcacatcggtggtgaaggcaatgttgcacgaaaacgttttgacggagagcacctgtatgtcactgtgaaagacagcggtatggcagatctagaagaactgaaccgtttggatggggtttccggtacggaactgaaccggaacattctgtccgttaccatccaggaagattttttggaggatgttacaatggcaaaagatttcaaacagctggcgcagaatatcatgacgttggctggagcaaaggaaaatgttacttccgtatttcactgcatgacccgtctgcgcatgacggtcaaggacgtcaagaaggtagaccagaaagctatcaatgatctggacggcgtgttgggcgtcacctatcagggcggtcagctgcaggtcatcatcggcaaggatctgctgaaggtttatgaagaggtgctgaagctgggctacagcgatggcggcgctgtggacgaaaaactggacggtgacctgaaaggcgaaaagatttcggttgggcaggcagtgattggttacatatccgctgccgtacagcctatggttccagcactgatcggcggcggtatgatcaaggtgttcctactgctgatctccaaggtttatgctccctttgcgaacagttctacttatacgctgctgagcatcgtgggcaatgcggtattttatttcatgcccattctggtcgcttatggagcggccaaaaaactgggtgcgacccccacgtattccatggtcgtggccggtgcactggtcgctcctgaatggacggctattgtaagtgctggcgatccagtcaccatgtttggtatcaatgttgccctgaaaggatacggcagttctctgcttcctgcgctgctgctggcaatcgttgcgtattatgtggaaaaattcctgaacaaagtgatccccggcgtgttcaagcctatctttgtcggtacgttgacaatggccgccacctatgccgtctcgatccttgcactggcgcctctgggtcagctggcaggtacctatgtcaccgccgcgatcctgtggttgtataacattgcaggccccatcacggttgctctgtttacggctctgttcccctacatggtcatgaccggtatgcacatgactttgggagctcccatgatccagctgctgtcggaaactggttttgatcccctgttccgccccggtatgctgctgtccaacatggcagaaggcggcgcttctctgggtatcgccatcaaggcaaaggacaaggcaatcaaatccgaagcactatccgttgcagtgggctgcatctttgctagtgtgaccgagccggccatttacggttttaacctgccgctgaagaaacctatgtgggctgtttccctcggtggcgccatcggtggtgtcgtggccgctctgctgggtgcccataactacgagtatggttcttcctccctgtttgccctgccgatctttgaggataccatcgtggctatggttattgcaatcatcgtgacgatcgtagcatcctgtgcacttacgattctctttggctttgacgaggaaatcttgaagaaacactgatctcaaaattttgttcgccccggggagcgcatgcgtcccggggcgttggaggtattatgaaacttaagtccgattttttgtggggtggagcacttgcggctaaccagtgcgagggtgcctggcaggaagacggcaggctgcctgcgtctgctgactttctgccggatgcagcccacggcagatggaatgccatgctgcatccgggaaacattctggaaacgcggtacgattattatcctagtcgggaagcaattgatttttatcatcgatacaaagaggatatccgccttcttgcagagagcgggatcaaggcgctgcgtttgtccatttcatggacgcggatctatccgaccggggaagagaacgccccgaacgaagatggcctgcgtttttacgaggaactgtttacggagtgtcgtaggtacgggatagagccggtggtcaccctgtgccactttgatgtgccggaagccctgatccggaaatatggtgcctgggcagaccgcaggctgattgcactgtatgaaaaatatgctgccaccgtgtttgaccgctaccggaatctggtaaaatactggatgaccttcaatgagatcaacatgatcacccacatcccttatctgggcggtggcctgctggtggacaaggacgacccagagttcaaccagatcgtgtacaatgccgcgcataaccagctggtggcaagtgcctgcgcggtgcggatcggtaaaaaaatcaacccgaatttccgaattggatgcatgatggcggccggaagcttttatccctattcctgtaaccccaatgatgtgatggaagcacgtatcagtaacaacaaaaattacatttttccggatgtccaattgaacggctgttactccggattcgcccggaattactttgcaaaattgggcatcacgctggacgaacagccgggtgatgatgaacttctggctcagaactcctgcgattttctgggattcagttactattcctccaggctgatctccacggatccggagcatctgaaaaatgtggcggatggcaacgccattactaccctgcgcaacccgtatctgcagatcacgaaatggggacgtcagatcgacccggtcggcctgcgcgtgaccatgaatgatctgtatgatcgctatcacaagccgctgttcattgtggaaaacggtttgggcgtggaggatactctggaagtggacggttccgtccatgacccctaccgggtggagtatctcgatgctcatatcacccagatgaaaaaagccgttctggaggacggcattccctgcatgggatatctggtctggggcatcatcgatctggtcagcgcgggcggcggtgaaatggataagcggtacggactggtctatgtaaataaacataacgacggcaccggagacctcgcccgctacaaaaaagattcttttggttggtatgcacagaagattcgggaagagtgctatgaataaagcatataagcagtattttgatctgatatttggctccacactactgactttgggtatctacctgtttgtcacccccaatggtatcaactttggcggtgtgataggcctagctcagattatagagatttttctgcgtaggttcattgcaatccgcagtgatgcaaaccttgttggtatgatcaatttcctcatcaatgtaccgctgttcctgataggataccgggtcatgagccgcaggttctgcatcaaaaccatgctctcggtagcagtgcagacgttgcttctctcagtacttccgccgctcaaagcaccccttgtggaggatgtgctgctaaacagtatcttcggcgctattctctgtggtgtaggtgtcggctatgcgctgcggggcagtgggtgctgcggcggcatggacattgcatgcatgtgtctggtaaagaaatacccagattttaaaagcggacggctttctatttatgtcaatgcagttctcttttcggtctgcctattcctttttgatttggaaactacgatgtactccatcatctttgtggcaatcctgtatacggtggcagataggtttcacgaccagaacatcaatgtggcggccctgatatttacggatgtttccactgtgcagactgaaatcctgcagaagatgggacgtggcgtcaccttctggaacggatacggtgcgtacaccaaccaccctaagaagatccttttctgtgccgtgaacaagtatgaaatcggggagctgcaggaaattattcacgagcaggatcccaatgccttcgtcacattctttgtaggtcctctgatccatggcggatttgaaaaaaggctatgagattgagggtaatcgcatagaacaaatgaagcgaggaacgctctgcaattttgacatccgctcaggctgcaattaagtctccccggaaataaaatctggtaggacaaagaagataaaagctcttggcttctgtaatggaggccaagagctttttgcatcttgttttgtaagctgaaagagggtacaatgatagcagaagtacgcacatcgatgaggtgataagatgctgaacattttttacggtgatatgaaggaagcggtgtacaatacggcttcttatttcaaatacgattacgaggaagactggatcgttgacccgatggtcaaggaaatgattcaggatgtggataagtctaccgttatcgacagtggtgtaattgacagcccggtcttgggtaaaattccaccgattggtttgtctggtggcgtaaagacactgattttggtaaagtttgagccggagaaagtgttcaatgtatcgacttgtggcgacaactgtgcaaagtggctgctcaaaattgcagagcaggaggatcgcacggtgaatttgcgtcacctgatggattttggcaaaaagccgtttacaataaaagtgctgaatacgaatcaaatcgttcacagtatggaagagctgattttggccgcaggtgagtttgtgtaaaggggctgacagaaatgaaaggcattcataaagtggtcgttggcacaaagtacctgaaatatgaatttgaactgcgacgcaacttgaccatcattcgtggggatagtgcaacgggtaaaacgactctcgtagatatgattcgtacccatatgaacgatggagagagtggaccggtcactctaaattgtgataaaagttgctacgtggtagaaggaaatctttggaagggacaacttgacaatattcaggacagcattgtttttatcgatgaaggaaacgagtttgtcaagaccaaagattttgcgcgtgcgattcagcagacggataactattatgttatcgtgaccagagagggtttgccggccttgccatacagtgtggaagaagtgtatggaatccgaacctctggaaagtatgggacactgaaacggagttatcattcgttctatcgaatttacccggacagtacaacggaaaaaattaagccggagaaaattctgaccgaggacagcaattcggggtatcagttttttgatgcggtctgtacagaacatcaaatgcaatgtgatactgcgaacggaaaatctaatgtattttcctatttgaaggttcataaggatgaaaagattctggtgattgcagatggtgccgcttttggcccggaaatggacagggtgctgcagttggtgcagacaagaaaaaatctggcactatatctgccggaatcttttgaatggctgatactttcctctggaattttgaaagatgcagagaccacacagattttgcaaacaccgtctggctacatcgatagtaaggaatattttagctgggagcgctactttacggcacttttgatagagaaagcggctgggacatatctgaattatactgagaaaacgctaaacaaggcctatttgagtgatagcacgaagaatgcgattctgggtcagatgatgaaagggaaaccggagtaaattggaagatgcacatgaaaaaggtgcgaggcaaaatatgaaacttataacgaaagaagtttcaaatcctgagaaaaaattctggatttgggatgaaaaaatcacaaataaacaagatgggcgaatttaccctcataatacaacgaacgtaggatccgggaaaagcgttgcggtataccaactaagcgagagtggcaaggaagaacagattgcacaactagaaattccagattataaaaaattggaggagtattattggcaagaaaaagagatatgtttggattatacgtatatagatgaatttgagtggcttggagataaagcaccttatgaagtagaaggaaatccttatagagaatatgaaaaaataacagctagggcagcgattttttattctgaagagccaaaactgattcatcttatgcagttaaagattcaaagtgaagatttggatttttcatatgcaggattttataatctaaatcttgatatatgcgatattacccttgtaaatggaaatgttgaatttagcgatgctcatattatagaaacggagatttcattaggaggaattgagtgtggcggaagtagatattttacaccagaagtatcatttcgttacataaaagcccgcaaatcgaaaattttaacgatgctaatgacgcaatctttaagtttggattttttatgtgccaaaacagaagaaacagaggcttgcttggatccgctgccgaagacttttgaaaatttgtgttttgtgaaatcaaatatttctcaagtaaagttgtctaatgcgtcaataaaagaattagacattagagaagcaagatttgattgcttggaattgctgcgttgtgaaattttgggtaaaagtaatcttagtggaagcataaaaagatttctatttaatgattgcataaatacaaatattttaaggattgcattagaagatacagaagaagtatcatttgaggatgcaatcaatagtgggagaatttattttaaagacttccctaaactagttgaaaagattaccgaaaaaaagaatgaacaactcttgatgctaaaggaaaattttagacagctcggggaatatgataatgaagatatttgtcatcttcattatcaaaaagcgaaaacgaaagaagaaaaaagatattatataagaggattacgcaggctgctggattggattagcggatatggaaccaaaccgtgccgaacatttttaactataattcttctgattttaatattcggaacggcatattatgtaataccatgtttacaatatcaaggagtaagtggatggctagagtgcatttatgcaagtgccattactttttttgcagtaggctatggcgatctttttcctgctacacttgcaacgaagatggtttcattggtagaggcgttctctggagtgacaatgacaagctatttcttggtgcttctttcgagaaaggtcattcgataatgattaatgtcatggtggagtaaaacgaacgctctgtaattttggcacccgctcaggctgctatcaagaacccccgcaagtaattgcgtgagcgcttgaaaaagcacaaataaagcaaacgaaccgccccggtttccacagcaggaagccggggcggtttttgcattgcggcatccacctgtgcgggcgtttatttgcaaactgttcaaaattaccacaaagaattgccacgattatctggcataataggggtgcactcagggagaacggaacggacatcccccataacctccgaaaggttctccccgcaaatgcccatgcaggcacatttccctgcgggtgcagccgcagcagcggtgcacagcaggcccataaaaactgtctcccgtttctatgcgaggcaatagccagaacggcggacagactaccaaatccctcctgatcaagccgcaatgttcaggggttcctaatacagcaggcagtgtcgctttcctcctcctttccacgacactgcctgctttttgtttgtatatttatatcgacaaaacgaaaataccggagcatctgcagatgctccggtattttatattgcttggtcgttttgatctgttactgcccggcggggaactccttctcccgctcttccttcaaaatggcggtggcgcgctgcatggtggcagcggcgcggcgcagttcttcatccccaagctcggcgcgcatccggcggtagcagcgctgcaaaagcgcctgctcctctgccatcagctccaccgccttgctggaaagctccacataggtgcgcccggcctcgcggtcggtcttccatgccacaaagccgttgtcctgcagcttctcaatgcccttggaaagctcggtcatccgcactcccatagcggcggcaaggtccgcaagatagagcttttcgccgggatgtgtctcctgctctaccttgatataatacaggatgagataatctgcccgctggatggtgctgaacaccttatccacgttgagctcgtggaggaagaaccattccccctgatgctgctgcatttcttccatgccgatgccctccctttatgcccgctggctgcgcgggatataatcgtgggtgccgccaaggctcttgtaggccgggcggatgatcttgttggcgctgagcagctcctcgatgcggtgggcgctccagcccatgacgcgcgcaacggcaaacagcggagtgtacagttccatggggatgcccagcatctcgtacacaaagccgctgtaaaagtccacgttggggcttacgcccttgaagatcttgcgctcctgcgcgataagctggggtgccatgcgctcgatgcgggtgtagagggaaagctccttatctcggcctttttcgtgggcaagctgctccacatagcccttgaacaccacctcgcgcgggtcgctgagggagtagacggcgtgacccatgccgtagatcagccccttgcggtcaaaggcttcgccatggagcagctttttcaggtaggcttccagctcctcgtcgtcctcgatgtcgtggaggttgtcccggatgttctgcatcatatgcatgaccatcaggttggcaccgccgtggcgcgggcccttgagggagcacagcgccgccgccatggccgagtaggtgtcggtgccggaggaggtgaccacgcgggtggtaaaggtggagttgttgccgccgccgtgctcggcgtgcagcagcagcgccacgtccagcacgcgggcctccagcggggtgtactgcatatccgggcgcagcatccgcaaaaagttctctgcggtggaaaggctggagtccgggcggtggatatacatactggcgtctttttcgtagtggttataggcgtggtagctgtacaccgccagcatggggaagatgcccgccagctggatgctctggcgcagcacgttggcggtgtccaggtccgccgccttggggtcgtaggacgccagcgtcagcacgctgcgcgccatactgttcatgatatcatggctgggcgctttcataatgacatcgcgggtaaagttggtgggcatggtgcggcactcgcccagcaccgcgcagaactgttccagctgctccggggtgggcagctggccaaacagcagcagatagcctgcctcctcaaaggcaaagcggctgccgcggctgccgttgatgaggtcttttacgtcatagccgcggtacagcagctgaccgtctgccgggtgcttgaccccgtccacatactggaacgcccggatatccgagatgttggtcagacctgccagcacgcccttgccggtctcatcgcgcaagcccgccttgaccccgaactcccggtagagatccttggggatgcggtcgtgctctgcacaaaggggctgctgctggtcgaagtagcttaatacattctgcaaatgatccatgtgtctggctgctcctttcctgttcgttcgtatcagtttctcatttcataataacttttatattacagaacggatatttcagtgtcaaccaaccatttgtaaacaaaaataaaacaattcagccgtaggggtcgtacaggtcgtactcctcggtctcctgatgcttttcttccagcacccggatggcctgttccaaggcgctctgagagcagccgctctcgcttaccagcgcatggacggcggcggcaaggtcgccgtcaaacagggtgtccagccgctggcgcatacagtacacgccgtacgcccgccgggtgaccagcggcacatacacattgcagttgccatgctttgccgacctgacccagcctttttcctccaaccggtagagaaaattcagcaccgtagccgctgcccagccggtagccttgagtttctggctgatgtcccgccgcgccgccgcgcccgggcacgcccacaccgcaagcatcacctgttcttccgccgccgaaagcggccgcagggtatccggtaagccgtacatctgttgtacctccgtaaattttacgaactcccccagtcacggctacgccgtgacagccccctcggagatggggcctttggcatagcggtaaagtttccagctgaagcgcaaagtatccggttgcgccagaggctccctctccgagggagctggcaaaaccgtcaggttttgaccgaggaaattttcttttacatttgtcttagtgttcccagtataccgcattttcgctaaaggtgcaagggtggaaaatccgcatgaaaccaagggatagtgcatatcttttacaattgtctcatattttgtccctgcacggcgtacatttgtgtgctttgtgccatcaggcggggtgcaggggcaatatctttgtgcaaagatgctcttgttttcggcatggaaaaaccggtatactacggctacggaaagtaacagacacatcgcaaaaacggcggtgctgcgtgataggtgtatcacaggaaaaggagaggttgattatggcacgagtatataacttcagcgcaggtcccagtatgctgcccgaaaaggtgctgcggcaggcacaggccgagctgctggaatacggcgacagcggccagagcgtcatggagatgagccaccgcagcaagtggttcgacgccatcatcaaggacactgaagccacgctgcgccgggtaatgaacatccccgataactacaaggtgggcttctttcagggcggcgctacccagcagtttgccatggtgccgctgaactttatgaccaccggcaaggcggactatatcgtgtccggcaacttctcgggtctggctgccaaggaagccgccaagttcggtgaagccaagatcgtagcgtccagcaaagataaaaacttcacttatatcccggatgtaaacgccattgactacgacaaggacgccagctacatccacatctgccagaacaacaccattttcggcacccagtatgtggagctgccgcaggtggagggtgtgccgctggtggcagatatgagctccatgatcctttccaagcccgtggatgtcagcaagtacggctgcatctactttggcgtgcagaagaacgtagcccccgccggcatggccattgccatcatccgggacgacctgctgggtcacgccgcagacaacgtacccaccatgatgaactacaccaccctgctggcgaaggacagtatgtacaacaccccgccgtgctggtgcatctacatgaccggtctggtgctcaagtatctggaaaacgacattggcggtcttgccaatatgcagaagatcaacgaagccaaggccaaggtactgtacgactatctggacgggcaggagttcttcacgaaccctgtggagcaccgctaccgcagcaccatgaacgtcaccttcaccagccctaacccggacatggacaaaaagttctgcgccgaagccgccgaggcgggctttgtgaacctgaagggccaccgtctggtaggcggtatgcgcgcttccatctataacgccatgcctgccgagggtgtggacaagctggtggacttcatggagaagttccgcaaagagaatgcataaagatcagcattctcgccctctccgtcatcactttcgtgatgccacctctcccaaagggagaggctttggcagtccatgcaaacttcatctttatgccaagggctctccctttgggagagctggacgcgaagcggcctgagagggcgagcacgcttacaatttacagctggaacgaggttttttatatgtacaccatcaaaacgctcaacgccatcagcccggtggggctggcaaaactgcccaagaaccagttcgatgtctcggtggatgccgatgctccggacggtattctggtgcgcagcgccgaccttttgaacactaccttcaatgataatctgctggctatcgcccgcgccggtgcgggtgtgaacaacatcccactggagcgctgcagcgagcagggcatcgtggtgttcaacaccccgggtgccaacgccaacgccgtggcagagctggtcgtcgggatgctcattgcgggcagccgcaacgtggcagccgccgcccagtggtgtcagggattggctggtgaccccgccatggccaagagcgtggaaaagggcaaaaagcagtttgtgggcaacgagatcaagggcaagacccttggcgtcatcggtctgggtgccatcggctctcgggtggcaaactgcgccatcgagctgggcatggaggtctacggctacgacccctacatctccattgaagccgcatggaatctgagcagtcaggtgcaccactgcgtaaacctgaacgatatgctgcccctgtgcgactacatcaccatccatgtgccctacctgcccaccaccaaggacaccatcaacgcccagacccttgccctgtgcaaggacggcgtcaagatcctgaactacgcccgcggcgaactggtgaacaccgccgccctgctggaagccatggacaacggcaaggtgtccggctacatgaccgacttcccctccgaggccattctgggtcgtcccggcatcgtgtgcaccccgcaccttggcgcttccaccccggaagccgaggacaactgcgccgtcatggcggcgcaggagctgagcgactacctgcgcaacggcaatattgcccactcggtcaacctgccggaggtgcaccagccccgcgccggcggcaagcgcatctgcatcatccacaagaatgagccgggcatgatcagccagatcaccgccctgaccaccgaagccggcctgaacatcgaaaacatggtgaacaagagcaaaaagaacatggcctacaccatgctggacgccaccggtgccgtggatgcccgcctgagcgagaaactgagcagcatccccgccgtgatccgggtacgcatcctgtaagcgggaaagcagcggacaggctgcgaatcatagaataaagatccccctgcaagcctttaagtgcctgcagggggatctttgtgctcctactattccgcgttacaccccaaagaactctttggcaatgtcagcgctgcgcttggcatccttggcgtaccagtccgcgccgatcttctcggcgtattccggggtcagcacggcaccgcccaccatgatcttgcagtccagctgcgccgcgtgcagggcggcgatggtctcctccatgcttttcagggtggtggtcatcagggcggaaagccctaccagatgcacgtccttttcccgcacggtgtccaccaccgtctccaccggcacgtcccggccaaggtccagcacctcaaagccgtagttttccagaatgacccggacgatattcttgccaatgtcgtgcacatcgcccttgacggtggcaaggacgatgcgtcccttgctggcgctgccctcgcccttttgggcaatggcggtcttgatctcctcaaaggcgctctgggcggcgctggcggcctgcagcagctgcggcaggaacagggtgcctttttcgtacttagcacctacgatgtccaaagcggggatcaaggcttcgtccaccacctccagcggctgcttttccgccagcagggcgcgggtatgggcggcggcgtcacccttcaagcccttttccaccgctttcatcagggcagcgtaggggccggtaagctctgtttcggcagcactggcggcaggcgcggcctttgcagcctgtgccagcgcggtgctggcgggcacacggtcggcaaagcgtgcaatgtactttgtgctctgcttgtcccggttggtcagcacgttgtaggcgtacaccgccgccatcatctcctcgctggaagggttcatgatggcaaggtccagcccggcgtacatcgccatggtcaggaaggtggtgttcaggtaggtgcggcagggcagaccaaagctgatgttggacacgcccagcacggtgcgcactcccagctcctttttgcaggcttccagcgcctgtaccgtggcaagcacatcctcctgctgggcgctggcggtcagggtaaggcagtcgatgtagatatcctcccgggggatgcccgctgccagtgccgcttcggtgatgcggcgggcaatggccacgcggtctgcggccttgggctggatgcctttttcgtcgatggcaagccccacgatggcggctccgtactttttgcacagcggcaggatggcggcaagcttttccggctcgccgttggtggagttgacgatgggcttgccgttgtacacccgcagaccccgcgccagcgcttccacgttggaggaatccagctgcaggggcaggctggtcacgctttgcagtgccttgaccacctgctccatcagcaccggctcatccacgccgggtgcgcccacattcacgtccagaacctgtgctccggcttctgcctgactgacggcctgttccagcacatagttcatgtcgccctcccgcagtgcctgctggaagcgctttttgccggtggggttgatgcgctcgcccaccaccgtgatgccgtccaccgtaacggtgtccaccggggtgcacagcactgagggcatccggtgcgcgggacgccccggggtgcagcctgcaaaggtgccgttgagcagcttgatgaactccggggtggtgccgcagcagccgccggcagcaaacaggtgcagctcccggtagggcttcatttgcaaggcgaacagctgcggggtgatgtcgtagccgctgccgtctgcccggggcagaccggcgttgggcttgacgaacaccgggaagttgccgggcacggcttctgccagccgctttgccatggggaagatctccttgggacccagtgagcagttgatgcccacggcgtctgcgcccaagccccgggcggtggcggcaaagctttccaccgtgcagccggtaaaggtgcgcccgcccgcttcaaagctcatgcttgccagaatgggcaggcgggtattctctttggcagccagcagggcggccttcagttcgtacaggtcggtgtaggtctcaaaaaagatcaggtctgccccggcggcttcgcccgcctttacgatgcgggcatactcggccacagcatcctcaaaggccagcgttccgctgggctccagcagctcgcccagcgggcctacgtccagcgcggtcagcgcaccgtagggcgcacaggcgcgcttgcagttttcgatacctgctgcgatgatctgctccagcgtgtaggcgctgcccgccagcttgtgggcagaagcgccgaaggtgttggcgttgacgatgcggctgcccgccgcagcgtactgcccatggatgccctcaatgagcgcagggtcggtgatattcagctcttccgggcgtgcacccagcttgagcccggcggcttgcagcatggtgcccatgccgccgtccagcaggatagtattgctctgcttgaaaagttcattcacttgcacaggtctttcccctctttctgtattcgcagcgggtgcgcagcacacaatggccgcacccggccagttgtccctttaccgggtggtcgctgacccccagcagggcggtcacgctcttgcgcggggtcatcaggttggtgtcggtgacgcacagccccgccttgcgcgcggtgtccagcgctgctgccaccatcggctgcaccgcgatgtcccaatcgccgtagccgggcgaaaagcgcccggtcagatactttccctcagtggccgcccactggcgcagctgtgcctctgcggcatcggcggtctgctcggccagtgcgctgcccaaggcatcggaggccaccccggcggcgatgtcgcccacgcccgcccggcggatctgggcatccaccccggggcccagcgttaccgccagcagaatggcctgcccgcagcctttcaggtgcttgtgcacgtcctcgccgggcagaagcccggcatcggtcagggcgggggtatctgccagcagccacaccgcccggggcatcgccgccgccagcagcggcaccgcgcacttttgcagcagtgccagcgtggcagcgtccggctcgccgtgcgcgccgaaataccgcgccgcctgcgccagatctactgcctgcggcttttccaacgccagcgggcggggtacaccgatcgccatgagccgcacctccttacttctcttaaataaagtactattcagtataccgcacttgtgggcttttatcaatcccgcaaaaagggagaaataaaaactccctcggtcatgaccgggggagtgcgctttttatttgatgcagcttgcgcagggggtatagcctgcggcaatggcttcgtcatagctggaaaagtgaacttgattcttttccgcaggcaggttggcgcaggtgggcaggtggaactttttgctgttcacgttgccgatgtaagcctgctgcgcggtgctggaagccgacgggtcagtggggttcagctggctgtccggcacaaagtgctcggtgcccacggtgaagttctgaccgtcgctgccaatggtgatggtgccttgcaggtcggtgcggtagacgtccacctttgcgtcccgcaggatgctcaacgtctcctcgtgcgggtgaccgtacttgttgcccgtgccgcaggagatgacgcccatttccggcagaacagcgttcaaaaacaggtagccggtactggtgctggagccgtggtgccccacctgcaaaacatcggctttcaggttggcaccgctgttcacaaggtcggtctcggcggtcttttccatgtcgccggtcagcagaaagctggtgttgccgtagtcgatgcgcagcaccagcgaggtgttgttggtgtcgctgtacccggtcaccgggcccagcagggtaacggtggcgctgcccagcggccagacggtgcccacggagggcacttccaattgcagaccctgctgctgcgtatacttgacaaaatcgttgaagcatttggtgctgctctcggtcaccgggctgtaagcgtgctgtgccgggaactttgccatcacggcggcaagcccgcccacatggtcctcgtgagcatgggagcagaacacatattgcagctgctgcaccccctgcttttgcaggtaggagactaccagactgccgtcgtctacgttgccgccgtcgtagagcatgaactgtccgtcacactccaccagtacgctcagcgcctgccctacatcaatgaagtgcatctcaaagggctggcttgccccggtggagggtttgacgatgtgtccgccgtcgccgggcaggctgtcacaggcggtaagccccagcgccagcacagcggccagcgccagcgcagccagccgcaggaacaggcggcgggggaacagggttactttttcttctttccagttttccacgttgcgttctctttctgttgattattcttaggtttatggccgggcgcagagttgggcgcaaagcgtgcgcccgggctgggctgacggcctgccggggtaacagtacgggtgtttttgccggtgctgcgtcccttctggctggaatgtacggtataagtgccgtcattgtggatggtcacctcggcgctttctgcccggcgggcggtgcgctgcacggcgcggcggcctgcggcgggcaccagcagggggatgaggtcctcccggtgggtcagctgcaaagccttgaccaccttttcggcgttgcggggctcgtagtattgcagcagtgcgcgttgcaaagccttgccctcgggggtcttttccacaaacaccggcttgagggtgtaggggtcaaggccggtatagaacatacaggtgctcaccgtgccgggggtggggtagaagtcctgcacctgctccgggcgcatatggttcttatagaggtactcggccagatagaccgcgtccttcagagtgctgcccgggtggctggacatgaggtagggcaccagatactgctttttgcccgccttcttgctcagctcgtagaacttatccttgaacttgttgaaggtctcgatgggcggtttgcccatgtaggcaagggtgttgggggcgcagtgctccggggcgaccttcagctggccggacacatggtactccaccagttccttaaagaaggtatcgtccggatcagccatcaggtagtcgaaccggatgccgctgcggatgaacacctttttcacgcccggcagctcccgcacccggcgcagaattttaaggtagtcgctgtgatccacgatcatgtgggagcaggtggtgggagcaaggcagtgcttgccgccggtgcacatcccgcgcagcatctgctcgcggcaggaggggaagcggaagtttgcggtggggccgcccacatcgtggatgtagcccttgaaatccggctcgtgagtcatgcgctcggcttcctccacgatgctgtcggcgctgcggctggtgacccgccgcccctgatgcagctggatggcgcagaagttgcagccgccgaagcagccgcggttctggatgatggagaactgcacctcgcggatggcgggcacaccgcccatgctctcgtagatggggtggtagcggcgggtgtagggcagggcgtataccttgtccagttctccgcgcaccagcggctttgcggggatgttctgcaccagatacttttcgctctgcttctgcacgatgatctggccgctgaccacgtcctgattgtccatctggatgcggcaggccttggcgtaggcggtcttgtcgctggcaacctttttaaaaccggcgcactccacataccgctggggcaggtggtcgaaatcggtcaggtagcaggtgccgttcacgtccgtgatggtctccaccggctccccggcggccagacggcgggcaatctccacggtctggtgctcgcccatgccaaagctgatgagatccgcgccggagtcctcggcgatgctgggcaatacggtgtccagccagtaatcgtagtgggcaaaccggcgcaggctggcttccagaccgcctaagatcaccggcaggtcggggtaagcctgcttggcaagcttggtgtacacggtggcgctacggtccgggcgggcaccggccttgccgccgggggagtattcgtcctcggcgcggggaatttttgccacggaatagtggctgaccatgctgtccacgttgccgccgccgatgaaaaagccgtatttgggcttgccgaaccgcttgaagtcctcgcagtcggtatagcggggctgcgcaagcacgcccaccttgtagccctcggcctccagcaggcggctgatgatggcggtgccaaagctggggtggtctacataggcgtcaccgcctaccaccacaaagtccagctgctcccagccccgggcttccatgtccgcccggctgatgggaagaaattcggtgtagatctggggagaagtgttgtccatttactgatatcctcattcttggttgaacacgggcagcgtcctcgccctctcagtccgcttcgcgtccagctctcccaaagggagagcctctggcgaaaccggaaactttgccggactgccaaggcctctccctttgggagaggtggcaatgcgtaagcattgacggagagggcgagcgcgcttttgttttattcctccggttggttcatctgcatttccagccactgctggcggctgatgagcacggcgcggggctttgcgccctcgtaggggccgatgatgctcttttgctccatctcgtccatgatgcgggcggcgcgggcgtagcccaacttgcagcggcgctgcaacaggctggtggaagcctgaccggcgtcgatgaccacatccacggcctgcttgaacatggggtcggagcctgcgtcctcctcggcgtcggcaccgccgccgccctttttgccgtcctgaatggcgtgcttttccatggcttcgatcatggcttcatcgtattgcacggtggcgctggatttgataaagtccagcacacggctgatctcttcatcccgcacaaaggtgccctgaatacgggtgggcttgggtgcgcccacgggcataaagagcatatcgccctgacccagcagcttttctgcaccggcaccgtccagaatggtgcggctgtccacctgactggacaccgcaaaggcgatgcggctggggatgttggccttgatcaggccggtgatcacgtccacgctggggcgctgggtggcaacgatcaggtgcataccggcggcacgggctttctgggcgatgcggcagatggaatcttccacatccttgcccaccaccatcatcaaatcggccagctcatcgatgataatggcgatgtagggcatcttttccagttctggctgctcggcagccagcttgttgaaggacttgatgtcgcgcacgttgttctctgcaaacaagcggtagcggcgctccatctcctgcaccgcgctgcccagtgcaccggcggccttgcggggctcggtgacaacgggcatcagcagatgggggatgccgttatactcggccagctccaccaccttggggtcgatgagcagcagcttcacgtcctccgggctggagcggaacagcaggctcatgatgatgctgttcacgcacacggatttaccgctgccggtgctgcccgcgatgagcaggtggggcatcttacacaggtcggtcacctgcgccacaccggcaatgtccttgccaagggcgatgcccagcggcgaggtcatgcgcagaaaactctggctctcaaagatgctgcggatggaaacggcggtctttttgtggttgggcacctcgatgcccacggcgggcttgccggggatgggggcttccatacgcacatctgccaccgcgaggttcagggcgatatcgtccgccagcgaggtgatgcggctgatcttcacgcccgccatgggctgcagctcgtaccgggtaacggagggcccgcgggagatatccagcacccgggtgcgcacgccgaagctttccagcgtgtccaccagcttctgggcgttggctttcagctcctcctgtgcgccggggtcgctttcctcctgcgttttttcaaacagctcgatgggcgggtactggtactcgtagctgtccaccggctcggcttcctcggtggggacagtagcggctgcctgctccgagacggcgggcttttccatggccgctgccaccagcgagttgatgtccttttcctccaccggctcggcggtgatgctgatccagccgtcctcgtccggcgcagagcggaacgccacggcgttctcggcgctcacccggggcacagcgggctggatgggcgcagcttccggctgcggcggcatctgcggctgcactaccggcgctgtcggctggacgatgggggtatcaaaagcgggggcaggggcaggctcttccggctgcggggcgtccttggcaaagaaatctgccgcagcggtgaccaccgggtctgccacgatgggcggcggcgtgggcttgggtgcagggcgcagcgggtcctgcccgaaggtgccgcccggcccgacgatcagcggctcaatgggctcgctgccgccctcggaaagggcggtgtggtcggggccaaggtctacgtcaaaggcggcgcggggatgggcaacgctgacccgtactggggtgatgggcggtgcagcgggctccggctgggcaggggcggcgggcgtggtttcggtgtccgccgcgtctgcttccatctcctgcgttaccttgtgtccccagcgcagcacgccggacatccagtccggcacacccagatgcagcccggcgggctcgtcctcctcgtccagcggttcgtcctcggtttcgtcgtattcctcgtcgatctcccgctctgcctgccggatggcggcgcgctcggcacggcgggcagcactctgctctgcaaaggcggcaccgcgggcgtggatgccgccggtgacggcgcacagccagacccagacctcggcgggggtgacgtcaaaaatgtacaggctgccgcacagcaagagcacgatcatgatgaggtttgccgccgggcgaccgcacagcaaaagcagcacaccgcccagcacaaagcctattgcgccgccggagagccatgcgttgacgccgttggcgtagcaggcagaaagcatttgcagcgccgacagcccctgcggctggatatcggaaaacacgatgaccgtgccgcagacaaagacaagccccagcaccagcttgaggatgcgggacagcagctcctcgccccgggtgtacaaaacggccagacagcacacggccgcacccagcacaaagctgccgcagccgaacagcccgaacagcacatcatggagcacccgccatacggaatcgccctgcacaaaggcaagcaccatcagcagcaggccgccaaacagggtgccaagccctgccgggagccgctgttctgcctttttacggcgggcagcagtacgccgtttcgttgattttcgttttttcgttgccattctactctgttccccaacttcccatagacacaatatttgattctactattgtaccacgcaagggcaaaaatggcaaaccataatgttgtttttgttgaggaaataaaactcccccagtctgctcccgctggtcgcagccagccccctctgggatggggcctttggcatgacggtaaagtttccggctaaagtgcaaagttggcggctgcgccagaggctccctctccgagggagctggcaaaaccgtcaggttttgactgagggagttcgttccagcccctctcgtgaaaaggcagttccgaaacgcccgcaggcgtttcggaactgcaaataaaaaaataattccgctgcttctgcgcaaagcgaacgcggagcgcagttcaaatcgtccggcgggggagacgcaaggccttacccccgttcgatttccttatacagccacgccagcgcgtccgaaagaccgcccagttcatcgatcagcttttcctttacggcgcggcgcccgtccagcaccgtgcccatgtccatgaccagctccccggtgtggagcatcagctgggtgtagcgcttttcgggcataccgctgtgggcggctacaaagccggtgatgcgctgctgcatctgctcaaagcagtgcatggtctgcggtacgcccaagatcagcccggagtgccgcaccggatgcaccgtcatggtggcggtgggcacaataaagctgtgccgcgcgctgaccgccagcgggatgccgatggagtgcccgccgcccagtaccagcgtggcgctgggcttggagatgctggcaatcagctctgccagtgcaagaccggtctccacatcgccgcccaccgtgttcagcagcaccagcagcccctcgatgtggggatcctcctgcactgccaccagctgtgggatgacgtgttcgtacttggtggttttttgcccctgcggcgcttcggtgtgtccttcgatctggccgatgacggtcaggcagtggatgacatgaccgccccggctcagggtgaccgtgcccagatcctcgatatcctctttttccatccggtgctgctctgcgggggtgtcttttgccgtatccatgcgcgttctccttccgtagcggggtctttgtggggtcagtatcccccggcaaccggggaagtatacaggagaaaagaaacaaaaaactttgtgaattttttgcttttttataaataggtatttgacattcgcctttcatgctgtatactttaaataatataacaggataaaatggaacatctctctgcgcgcaaagaagccccttgcatggcggcagaagctgcagcgcgttgggcagaaaggagaattttcctatgaacaccccccaaaaagcatcgatccctgtgatcaagcgtctccccaaatattaccggtatctgcgctccttgcaggccgacggcattaccagcatctcctcccgggagctggcctctcagatgggcaccaccgcctcacaggtgcggcaggacttcaactgcatcggtgacgtgaacggccggcagggcatcggctactcggtggagaacctgctttccattctggaaagcctgctgttcggcaacggcgaccgtctgcccaccattctgatcggctgcggccgtctgggcaaggcggtgagccgctttatcaccaccgataccaacggctacaagctgatcgcggcctttgacgtggccgagaacgaggtgggcaaggagatcagcggtatccgcatccggcacattgacgagctggaagccttctgtgaggaaaacaagcccaaggtggcggtgctctgcgtcccccgcgatggtgcacagcaggtcagcggacggctggtggatctgggcatcgagggcttctggaacttctcccactatgatctgtcggtgtcgtaccccaatgtggtggtggaaaacgtccatctgggcgacagcctgatgagcttgggctaccgtctgcgcaatcaggagtgacggcatggcaaaattgtatttccgctacggtgccatgaacagcggcaagagcacggcgctgatgcaggtggcacacaactacgaagagcagggcatgaaggtgctcattttgaagccgcaggtggataccaagggcggcggggagctggtaagccgtctgggcgtgcgccgcaaggcagacctgctgatcccgccggagctgaacgtgttcgaagccgtgaaggcggcaaacgatgcttctggcccgctggcctgtgtgctgtgcgacgagagccagttctttaccccggagcaggccgagcagctgttcatggtcacggtagatctgaacatcccggtaatctgctacggtctgcgggcagatttttccctcaagggcttcccgggctctacccgtctgctggagctggcgcacaccatcgaggagatgaaaaccatctgcacctgcgggcgcaaggccatctgcaactgccgcaaggtgaacgggcagttcgtctttgagggcgagcaggtagccatcgaccttgaaaacgatgtgcagtatgtcagtatgtgcccccagtgctacttcaaggcacggcgggcgttttacgctgcaaggaaaaactgagatacctttatattgtatacaagccgctgtaccgtgccgggtgcagcggcttttttgcgtgatttgcggaagagttaccccctcagtctcgctgcgctccgcgggggcagttcctgcttgccgggggatgttctcttttgacaccaaaagagaaccagaaaagtgccagcgatttcgacgcgctggagccacgaaaaaggggctgctcgccccttttaaccccaaagaagtgggctccaccggaaaaaactgaagattcacgcctgttcggcgtgaagatcttttaaccgttttttccggctccgccgatttaaagcccctcagtcgctgcgcgacagctccccccggggagcgagcgtgcccgcaaactctgcacttaagccgggaactttgccgctatgccaagggctctccctttgaggaaagacttcccccgttccgggggaagatgtcgcgcagcgacaaaagggggagtctgtcaccgcaggtgactgagagggcgaggacgctgcccttggggaaggtggctgcgaacacagtgagcagacggaaggggtatccccaacaggctgtatacagattgatatattaatttgctgcgtttcgcggccactgatatatcaactgggcgaaatacgcacgttttttgcgctattgatatatcagttcgggctgggcaattactcgacggaggggggagagagtgggaaaagaagagagcagcggggggcggcagagcataaaaaattacaggcagaacggtaaatgtaacaggaattattgaaatttttgccgttcttcccatgttgcatcccagatttttatgcaagtcattgaagtatacaagttgcacagtttttcagcgcaagtttattcatttcggcaaggacgtcgaatctctttcaaaaacaagggcaatatttgtatgtttttatcccgtatcactgtaaattgcatctttcttttttcggtggcttttgttatcataattgtatacaagggggatatgtgcagaccccctacatgaagatgttttctattaggaggagaacaaaaatgagcaaggcaatttctcgtcgtaacttcctgatggctaccggcgctgtcggtgctgcaggtctgctggctgcctgcggcagcaagcccgctgcttcttccaccgcttcttccgctgcttctcaggcccccgctgcttccgcagatgagagtctggctctgtctgacggccccgtcaacctgagcatcagctggtggggcggcgacagccgtcacgctgcttaccagagcgctctggaggctttccaggctgagcactccaacatcaccgtagagcccaccttcgccgcatggtccggctgggaagagaagatggctgctgccttcatcgcaggcaacgcacaggatgtctgccaggtgaactggaactggctgtacaactactctgctgacggcagcaagttcgtggacctgaacaccacctccaagttcatcgacctgacccagtgggatgccgctgctatggacgcctgctacgtggccaacagccagcagtgcgtgcccgtctccatgaccggccgtatcttctactggaacatgaccacctttaataaggctggcatcaccgaggtccccaagtctctggacgatctgatggctgccggtaaggctttccaggagaagctgggcaacgattactaccccatgcacctgggcgcatacgaccgtatgatcctgatggtgttctatctcgagtccaagtacggcaaggactgggcagatcccgttacctccaccctgaactacaccgaggacgagatcgctgagggtctggccttcatcaagagcctggtggacaaccacgtcatgatgaacctgaagacctactactctgcaaactccgataccgctacccaccagtccaacgagtggatcaccggtaagatcgcaggcatcttcgagtgggattccgctgctaccaagtacgcttccgctctggacgacagcaacaaggacggcttcaccgtcggcgaggagatcaagttcggcgacaacaacggcggcttctccaaggtgtccatgggtctggctatcaccaagacctgcaagaacgttgccgaggctgctaccctgatcaacttcctgctgaacgaggagaagggcgcttccatcatgggttctgagtgcggcatccccgcttccaaggctggcctgaagtttgctcaggacgccggcgctgtcaagagcctggttgctgacgcaaatgccaaggtcatggcattcaccaccaacaagctggatcccctgttcgagaacaacgacctgaaggcttccggcaccggcatctatcaggaagtgttcgacaacatcgactacggcgatcagacccccgaagaggctgtcgagactctgctggacggcatggagtctgttggctacaccgtcggctaagcttattgcactgacagcagcctgaaccggcagcgatactctgaatgaaataggggcatctgccgcccgtacgacaggtgcccttgttttttcggagaatgattatcaaaccttgaatgaattgttgccggtctgtgacctgctgcactgtctgcttcaaaatcctgcaaaaggaggacttcggatgaaaaaaagtaatgcgctcgcaggcgcacgaactccgtttcagaaatgggtcgataaatatcagggcctgttttatctgatcccctggatcatcggctttctcgtctttaaggcgttccccttcggtcagtcgctgtattacagctttaccgatatgaacttcttcaaggacggtaccagctttgttggtctggccaactacattaccgcattccacaccaaaaagatcaccaaggcgctgatcatcaccttcaagtacgcctttatcaccgtgcccctgaagctgatcttcgcgctgttcatcgcctacatcctgaacttcaagatcgcctgcgtcaacctgttccgcaccgtgtactacatcccctccattctgggcggctctgtggctatcgctgtgctgtggaaggctgtgttcagcgtggacggtctgctgaacaccgtggtgcgcgctgtcacctttggtgcggtgcagggccccgagtggctgtctgaccccaactacgcactgtggatcatctgtttcctgcgtatatggcagttcggttccgccatggtgctgttccttgctgcactgaagggcgtgcccgcagacctgtacgaggctgctaccatcgacggcgccggcaagtggcgtcagttcttctccatcactgttccgatgatcacccccatcatcttctacaacctggtcactcagatctgccaggctttccaggagttcaacggcccctacatcatcaccaacggtggtccccgtggttccactaccctgatctccctgctggtttacaactacgcatttaagtcctacgacatgggcatggcttctgctctggcatggatcatgttcatcatcgtctgcatcctgacgatcattgcgttcaccagccagaagaagtgggtctactactcggatgaaaggtaaggtgaccaatatgggaatgaaagcatcgaataagatcgcaaccttctttaagtacttcgtgctgatcctggttggcatcatcatgatctatcctctgctgtggatgatcagcgctaccttcaaggataacagcgagatctttgcaggcatcagcctgtggatcaaaaagcctacgctggatggctatcgcaacgccctgaacaacttcggcggctccatcaacatcctgcaggccatgctcaacacttacagctacgttctccccaaggtgatctgcactgtggtgtctgcctgtattgccgcttacggctttggccgtttcgacttccccggccgcaagctgctgttcaacatcatgctggctactctgttcctgccgcaggtcgtgctgaacgtgccccagtacctgctgtacaacaagttcggctgggtcgacagccccttctatctggccatctgggtgcactgcgcatttgctaccgagacctacttcgtgtatcagctggtgcagttcatgcgcaacgtcccgcgtgatctggacgaggctgccgccattgacggctgctcctccttccagaccctgtacaaggtcatcgtgcccatgctgggacccgctctggtgtcctgcgcactgttccagttcatgtggagctgcaacgactttatgggcccgctgctttacgtcagcacccccggcaagtaccccatgtccctgttcgtcaagctgtccatggacggtgataccggctttgcttggaacaagatccttgctctgtccctcatctccatcctgccgcagctgatcgtattcttctgtgcacaggatcagttcgttgaaggtatctccgcaggtgccgtcaagggctaatgcgccataagaacatctgaccaagaccaacaccccctgtgctgctcccaacggatggcacagggggtgttttggtaggtgcatcatttctgctgctttttgcggtattgcagggggctgatatccgtcacctcgcggaacacgcggcggaagtgggcggcgctggcaaagccggtctgctcggcaatagcgctgatggaaagctcggtggtctccagcagcttctgcgcagactcgatgcggcggttgttcaggtagtccacgatggactgcccggtcacccgccggaacaggcggctgagatagtaaggggaaaggtagaaccgcgccgctacctcggtaagagagaacttttgccggtagttggcggcaaggtaggcacacacctgctcaacggtctcgttgcgggggcgcgccacggcgctgctctcggcaaggcactcctgctctacatagtgcaggatcagcagcaggtacagcccgccgggatagtcctgctccggcatggcggtgcgcatcatctccagcagggtgcgcaggcggcgggtccacggcaccgggccgtacagcaccgtggcttccccgggcacgaacagccggacaaaatcccgctgggcggtgctgcgcagctcgtgcagggcactgagcgggaaccggcagcctaccagctccggtacggctgcaccggcggcggtgagcaccgcatcccccgcacccagcagcagtgcgctgccggggttcagcagcagactgttttcccccatttgcagggtgcagctgccctcgcttaccagcagaaaggtgcacatctcctcgtctgccgtcagctccagcttgccgccggtcagccgcacggtgtctgcctttaccttggcgttgatcttttcccgttccgctttcattttgcgcatcctttccggaaacagccctcccggtcgccgggagagcgcttttcctcatgataccacgtctgccccgtgggggcaagacaaactcacaggaggttatttcgcatgaatctgaccctgatccgttccatgacccgcagcgccgttttcgagctggagaacgagctgtgctaccgtccggcacacccctttaccgttgccctgaacggcaagacgatatacgaagcctgcaacaccaacgtgttctccctgttctccctgctgcccggcaccacctatacggtggaggtgcaggcagagggcgagaccctgaagctggatttcaccaccgaggctgagaccttcttcgtggatgctgcccgctacggtctggtggccgatggcgagaccgacaacactgtgcggctgcaggcggcgctgtctacctgccccaagggcggcacggtgtatgtgcccgccggccgttaccgcaccgccagcctgttcatgaagagcaacaccaccctgtatctggaaaagggtgctgtgctgctgggcgataacgaccgcacccattaccccattctgcccggcgtgctgcccagcgagaacgaggtggacgagtactacctgaccggctgggagggcaacccgctggacagctttgcaggcctgttgaacatcacgcaggtgcatgacgtggtggtgaccggcgagggcacgctggactgcgatgcccagaacggcgactggtgggtgaaccccaaggtcaagcgcatcgcatggcgtccccgcgccgtggctgcggtggacagcgagaacgtctgcctgcacggcatcacggtgcagaacagcttctcgtggaccatccaccccatctttgtcaagcatctcgacctgctcaacttcaacatcaacaacccctacaacgcccccaacacggacggcatcgaccccgagagctgcgagtatatccgcatcatcggcatgaacatccatgtgggtgacgactgcatcgccatgaaggccagcaaggtctttttgggcatgaagctgaagcgcagctgcgagcataccgtcatccgcaactgcctgctggacaagggtcacggcggcatcgtcatcggcagcgagatgagcggcggcgtcaaggatatggtggtgacccagtgcctgatggaccacaccgaccgcggtctgcgtgtcaagacccgccgcggccgcggcaacaccgccgtcatcgacgggctggtgttccgcaacgtggagatgcggggcgtcaaggcaccctttgtcatcaatatgttctacttctgcgacccggacggccacggcccctatgtgcagtgccgcgaggcgatgccggtggacgagtacacccccaagctgggcagcctgaccatggagaacatcgtggccaccgatgcccagttcgcgggctgctacttcgacggcctgccggagcagcccatcgagcgggtgaccatgcgggatgtgagcatcacctttgaccccaacgctaaggagggacaggcggccatggccgataaccgtccgctggtgaaaaagctggccatctatgccgagaacgtcaaggagatcgacctgcacaacgtgaagatcgaaggctacgagggcgagcggctgcactttgccaacgtaggacattttgaggaggactgacccatgacccatgaagagatcctgtccatgctgggcgactatgtggactacctgatcgccaattccagcgccgaggcaccgatgtggaacattgagaaggtgcgcagcggcaagcccaacaagtggaactacatcgacggctgcatgatcaccgcctgcctgagcctgtacaagactaccggcgacgagaagtatctggagttttccaaggagttcatcgactactttgtgcagccggacggctccatcaagacctacgaccccaaggagtacaatctggacaacgtgaatcagggcaagaacctgttcatcctgtatgacatctacggggacgagaagtaccgcaaggccatcgacaccatccgcagccagctgctcacccagccccgcaccaaggagggcaatttctggcacaaggacatctacccgtggcaggtgtggctggacggcacctatatggcacagcccttctacatggaggacgagacccgctttaacaagatgcagggctgtatcgacagctacaagcagttcatgaacatcaaaaagcatatgcgggatgaaaagaccggcctatactaccacggctacgacgagagccgccagatgtactgggcagaccccgagaccggctgcagccccaacttctggctgcgcgccatgggctggttccttgtggcgatggtggacgtgctggagcgcatggacgagcagttgtacaacgagtaccgcggcatcatggccatgctcaagcagaccgtggaggatatgcataagttccaagacgagcagagcgggatgttctggcaggtcatcgaccacccggaagccgagggcaactatctggagaccagcggcaccgccctgtttgcctacgcagtgctcaagggcgtgcgtctgggctacctgcctaagcggatggctgcatgggcagagaaggccttctacggcacctgcgaccggtatctgtccaagaacccggacggcagcttgcagctggacggcatctgccttgtggcaggtctgggcggcaaggatcaccgtgacggctcgctggcctactacttcagcgagccggtagtctgcaacgacgccaagggcgtaggtccgctggtgctggcctataccgagatgatcgcacggaagtaagccgaatcacaaccgtaccaaaatataaaggggctgctgtaaaatacagcgtccctcatcgctgataatacggcgcggcgatttgcgctgaaatctcacataaagaaaagcaagtgcaacacgttctctcaaaaaccaaaatttttgagggagatgtgatgcacttgctttttttgtaatattcgatcttccgttccgttttgaaagcgctatagatattttgctgccggaaaagcttttgcaaagtcaggagtctatggcctgcagcacgcaggcacaataccccggttcaggctggtaacaatggatggtcaggtatttgtccacctccgggctgtaatcgtggagggtgtgccttgtgccgttcaacgccacatctgcatacgatacaagccactttttatcaccattggggaacacctcgtaaaaagagcggttcagcatttcttctaccggcaccccttcgatcgttgccatctccgcgttgcagtagcggaagataaaatccacgccatgcccggattcattgaataccagctcgatgacgcagaacgccagcggcatatcgtccagcaggctgcacttttccagcaggctcatgctcatggggcggggctgtgtgtccgccagcccgatctctgcacgcaggcggcggtggtcgctcaggccgcgcttgcgtccctgaaaggtgcggccatcagacatggtgtagatcccatcgttgctgatgtttacgatctggctgcggcacaccgcaattcccttgctgatgttcaggaacagattttccggcagcacagacaaaacgctgtgcagcggcgcatacagcgcagcttcctcgccgtccatgcggtgaacgactgttttacggtcgctgcggtaaagatacaaaatgttttccggacaaaggtcatttttttgaaaccattcatgcagatcgttcatcgccgtgctccgttgtcaattgatgtgcttagtatagcacattatcgtgcagagtacaagattttaatggcgcttgcgtcaaattttatcgggcttttttgttgaaacttacgtttttgttacggaaaatgcaaaaataattgacttttaatcattgcccgtgtatcttgaacacagaaagccaaatggttttttcccataaggcgcataaagcaaaagacataacaggaggtctcatgttatgaaaatgacccgccgtgattttttgaacgtttctactgcggctgcggtggtttgcgcagctacacttttgcccgtagagaaagccgcagccgcacagcagacgctggctgcacagaaccttctggagcaggcgtatctgtacgcctttccgctggtgatcatggatgctacgcggacggcttccacaaacacccgcacagctacaagcaacaaggcccccatcaaccagttcatccatgcggaaaagctggcagatgcaacgacccgtgcggtggttacgccgaatgtggataccatctatacgcaggcgtttctggatgtcggcgcagaaccaatgatctacggcgtgccgcagaccgaccgcttttttaatgtacaggtgctggatgcgtggacaaacaccgccgctgtgctggaaacgccggggctttatgccattacccgtgcagactggcagggcgaactgccggaaggggtgcagcgcattgatgtgcctaccacgatggtctggaccattgcccgcatcgtgctttccggacaggaggacctgcccaacgtccgggctattcaggataagatgcagctgatgccgctttccgcctatcaggcgggtggatggaccgcccccgcaggcagctatgaccctgccaatgactttgtgccggtaaagcacgttcttgctatggacgcaaaggaattctttgataccgctaaccagctgatggaaaccaacccgcccgctgcggcagatgcgccggtactccgggagcttgcagcactgcatgtcggccccggtgagaagttcgatgacaaggcgctgggtctgttcagcgggctgcgctggaagctgatgctgctccagctgaagaaaaagctgcaaagcgaatcggagcgctatacacgccagatgggtcagtggatctatttcggcgaccccatcggcaactttggcacagcatatacctaccgtaccatggtggcgctgcggggtctgggtgccaacaccaccgatgttgccatctaccctaaaacagatgtggacagcaccggcacagtcctgaccggcaaaaagacctatacgctgcatatcgaggcagatcctcccacactggaaaagggcttctggtcggtgaccgcctacggggagagcgatttcctcattgaaaaccccattgaccgctactgcgtcaacgaccgctccggtctgcaccgtaatccggacggctcgatcgatatcaccctttccaaagaggcaccggcggacacgaccaactggctgccggtaggagagggagatttccacctcttccttcgtatctataaaccggatgccgccgcactgatagactggcagccgccggtcgtccgcgcaaactgatctggaattctgtaataaggaggaacctgctatgaaaatgacccgtcggaattttatttccgcttcggctgctgcaatgctggcgtgcggcgcatctctgtctgcccatgctgcggaaaataccacagaaaacggcctgaattttatcacagacattttcaaggatcccacccagccgggcgagaccgaaggcgcaacgaccatcacagcagaggccaacgccgaatggtatgaaaagctggatttttctgaccggcgggagtttgccaacgccgagcgcggctggctggacaacgcggaaggcaggatcatcgatggtgatgataacagatctgcatgggatctgcagagctacggcgatttgaaccgggatgctccagacactgtaaaccccagcctgtggcggaatacccaactcaatgccaaagctggtctgtttgaagtgtgcgatggcatttatcaggtgcgcggctttgatatggccaatacgacctttatccgcaccgaccacggctggatcgtgtttgatgtgctgatgtgcaaggaaaacatgaaggctgccaaggagctgatggagaaccgcttcggcccgctggacatcaaggcggtgctgtacagccactctcatgtggatcacttcggcggcgtggagggcgttattacccgggagcaggtagcggatgcaaagctctcgcttaaaaagcagctggcttccggcaagacccttgtgcttgcgccggcaggatttctgaagcacgccatcagcgaaaatgtctatgcaggcatcgccatggcacggcgcgcacagttccagtacggcacggtgcttgataagggcgaaaagggtgcgctgagcgtgggcatcggcatgggacagtccaccggtacggtgggcctcatcgctcctacttacgagatcggggaagatgttccgaagctgaccatcgatgggctggagatcgaattccagctgacccccggcaccgaagcccctgccgagatgaacgcctatttcccgaaataccgtgccctctggatggcggaaaactgcaccggcacgctgcataatctgtacaccctgcgcggcgcagaggtgcgcgatgccaacgattgggcaaagtacatcatcgaggcagaccagcgcttctgcgacaagaccgatgtggtgttccagagccacaactggccgcactggggcgaggagatccatgattatctgctgaatacggcagccatctataagtttatccacgaccagaccctgcattacatgaatcagggctatacctccactgaggtcgccgccatgctcaccctgcctgaaaagctggaaaaggtctggtacacccggccgtattacggcacactggcgcacaacgccaaggcggtctaccagaagtatctgggttggtacgatgcaaacccggtcaacctgaacccgctcccgcccagcgataccgccaagaagctggtagaatatctgggcagcacggatgccgttctgcgcaaggcacggaaggattttgaaaagggcgattatcagtgggtggcgcagatcaccaaggagttggtctttgcagacccgtccaaccagaaggcgcgcaacctgtgcgccgatgcgctggagcagctgggctatcaggcagagtccggcgcatggcgcaacgcctacctgatgggcgctgccgagctgcgcaagggcaacctgtccggtctggcacgcaccgccaatggtctgggctccgccatgaaggagatgaccgtggatatgctgctggattacatttccatcctgaccgacgccaacgccgcccagaacgacgacgtaacgctgaacctgatcgtgacggatgtgaacgaaaagttctatgtgacccgaaaaaacggtattctgctgtcctattcgggagagaaccgcccggacgcgcaggccaccgtcacctgcaagcggctgcagctccttgccctgatgcaggggcagcaggccggtcaggtgcaggtaagcggcgatgccactgccctgaagcgtctgctggcgtatgcgtccaagtttgaaaagaccttcaatgtgatcgagccgtaaaaacgattccaatacagcagggctgagcacctgaatcacagcataaaagggataccggaacatctgcggatgctccggtatcccttttggtataagatgagaacaaaaaaacagattgaatttacaaaattcaacctgtttggtggttgcgggggccggatttgaaccaacgaccttcgggttatgagcccgacgagctaccagactgctccaccccgcgatatttactttttgctttccagcggctctcgctgactgctcaagtataataccacagggcgggcagaatgtcaaccctttttcgaaaaaacttttacttttgctttttgctgcgctttctgcgccatgcaagcaccgcagcaacggcggcgcacgccagcactgccagcggccagacgcaggccagtgccaccaccagctgctgcaagccgttcacaaagttgccccagccggaggtaaaggcggtgccgatgcgggagaaaaagccctcgtccgcaggggtgtaggtctgcacctcgttcaggtcgatatacacggtgcactgctgcacctggtcgctgtaccagtccagctggctctgccagctctcgatctgggactgcacctcggtgagggagtcctcgatctgcagcaggtcggaaagattttcggcctttgcctgcaattgctgtaagcgggtgcgctgtgcctgcaggttagaaagtcgtgcggacacgtccatatactgagtggtcacatcatcggcctgctggctgcgataggtcacattaccggcagcggccacagcttccagaaagctctggtagttggcctgcggcacccggtaggtcaggttgaccgagcggctggaaccggtgcgcgtgtactcgctgctggattccagatagccgcccgcttcggcaagagcgttgtccagcgcactgcgggctgcttcgtagtccttgctttccagcgtcaggttggcagtgtagatgatcttggcactgtccaccgcaggggcagcagcttcggtgctgccggtgccgctgtactccgtttccagagagcggtcgtctgcctccagactataattcaccgcctcgggggtgctgtccagcgcggcgtgctggacagcaaagctgtccgatgccacagaagcggcagagctgttggcagcgccttcagctgcgtacagggcgggcgcgctgcttttggcgctgcccatcccgatacccagatgcagggtgctgtaacccagcacacacacagccagacaggcagccagcgtgcccagctgctttaccgggaagtggatgggctttttcttcttgggttcggcggtgttcaggggtgctgcgggtgcagcggtctgcggggcaggggcggccatcatgggctcagccttttcctctgcagtcagggtgtcggtcatggccagcagttttgccttcagatcgtccggggcagtcaggtcatcgacctccatcttgtattcataccacctcatcttcgatctcctccttcagcatcgtatgtaactgtgcccgtgcgcgccgcagccagcttagtaccgtgtttgtgggcaccgccatcatccgcccgatctctgccgcagtgtatccttcgtagtaatgcagatagatggcattgcggtagttttccggcagcgtgcggatggcatccagcacactgccgtcctccgcaaggacatcgggggcgggcaggttctcgtccagctcggtgtccttttggtgggcggcgcgggtcaggtcccggcagcggttgatggccacccgcagcagccatgctttgagatgctcctcactctcaaagatgccgttgtagtgcagcagcttttcaaacacatcctgcaccacatcctcagcatcggctgtgcagcggcaattatgcaccgcagtgcggtagacggtgtcgctgtaacgctgcaccgccaaggtaaaaacttcgtttctggtcagctgtcccattgtataaactctccttggatgcccggaagcgggcttctcgatggaatgtttgtggttctcacggggacgttcactcaatatacggctcagcatccccgattattgcagaacaaaacccggttccttccattttttgtgtgccggacgcaccggaccgcaaggcacgtccacgttctccgacaggggttggatatcctgccggtttaccggtcagtataccacggaatcgcaaaaagtaaaagaggggagcccttccttatttatagaccctttgcagcagcgccagccgctcggagagaaaggtctcggccttggggtggtgcagccagcatttgccgcttgtgctgtgcaccagtttctgcgccagtgcggcaggggcggtgtcaatcgccatcacgtcctgcatggtcaattgcagggtgagcgccgccggtacatccggcagcggcggcagcgggtcctcccacacaaagggcggcagcagctgcaccgccacggtcaggcgggtgcactcctcggtcagcagaagggcggcgggggtgccgtccggctgcacttgtaggctgctgtataaaagctgcatccgggcaggggagagcagccgggtcaagccctctgccggggcagccgcaagctgtaaatacccggcggcttcctcccggtagatgcgccgggcaggggcgtgcagccctgcgtagagggcgggcagcataaagctgccgcttttttccagcgcctgctgcgccagcagatagaactcggtcagcgggtacgccgcatccggctgcggcatcccgaaatccggccgcgatacatgacctccacccatagggacctccttgacaaaacacgatggtgcgattatactataaacagaaggggcgctgactgcaaaggtcagctttccatcccgcattagtcaaaaagattgaccgctagtttggtagactggggcggtcaatcttttttgttgtcatcgtttttcttctgtgaagctttatccatgacctcaagggtcaggcggatcacctcgatgatcaatcccaacagcgtaagaatgaccatcagcaggttcagcatctccgacagatccatctgacatccctcccttcgccttcagggcttggggagacttggctcaaaaaagttctcctcccacaagccgctggttcgttccatgtacaggaagaagcagtgctgcgggatgggaaagcatgaccaccgattatgcaatcagcgccgtattcttagaatatcatatttttcgacggattacaatatatctgttgattgtaaaccccttgcaaacttttccgttgacctgcggcgcaccggtgcggtatactcgggcacagatgccttgcaaaacgaaaaaacagaggggaaaactgactatgaaagacaaaaaactgactacctaccagatggccgttaccgctgtgatggctgccgtgctgtgcgtgctgggcccgctgaccgtgcccatcggagccgtgcccatctcgctggcaaactttgttatctgcctgactgcgtggctgctggggccgaagttcggcaccctgagcgtggtcctctatctggcactgggcaccatcggcattccggtgttctccggctacggcgccggtcttgccaagctggcaggccctaccggcggttatctggtgggctatctgctgctggccttcatcggcggtatgttcattgaaaagagcaagggcaacccggtggtttccgctgtgggtctggtgctgggcgatgccgcctgctatgtgctgggcaccgcatggttcgtgttccagatgcagtgcgagctgggctacgcgctgaccgtctgtgtctaccccttcattgcgctggacttgggcaagatcgtggtttcctgcatcgtgggtgcgctgctgcgtaagcgcctgacgcaggcaggcgtactgaaactgcagaatgcagtttcggaatgattgcgaattacttttgaaaagaataagcccggaaggtctgcgagccttccgggcttatctctttattcctgataccccaaggtggccgccatgaccgccttgatggtgtgcatccggttctcggcctcgtcaaacacgatgctctgggggccttcgaatacctcgtcggtcacctccatggcattgcggccaaagcgctcgcccatctccttgcccacggtggtcttgtggtcgtggtaggcgggcaggcagtgcataaatactgcatccgggcctgcaatattcatcagatcctgattgatctgatagggagccagatcgtggatgcgctccgcccaaacctctacgggttcgcccatggatacccacacatcggtgtacagtacgtccgcgccctttgcggccttgacgggatcctcctcaaaggagagggtcgccccggtctgggcggcaatggcctgacactgttccaccagcgcggggtcgggctgatactttttgggtgcacaggcggtaaagtgcagacccatcttggcgcagcccaccatcaggctgttgcccatgttgtagcgggcatcgccgaagtaaacgaagtggatgcccttcaagtggccgaaatgctcctgaatggtaaggaaatcggctaagatctgggtgggatggaactcgttggtcaggccgttccacaccggaacaccggcgtagtgcgccagatcttccacgatctgctggccgtagccccggtactcgatgccgtcaaacatccgtcccagcacccgggcggtatcggcgatggattcctttttgccgatctgactgccggaggggtccagataggtcacttccatgcccagatcgtgggcggccacctcaaagctgcagcgggtgcgggtggaggtcttttcaaagatcagggcgatgttcttgccccgcagctggtcgtgccggataccggccttctttttggccttcaggtcagcagccagctccagcagctgcccgatctcggcaggggtgtagtccaatagcttcaaaaagctgcgatttttcagttccattgtatatttccctctctatgcaagcactattgaatatttattcaagctatgatcctattatagtacgttgcatcaggaaggtcaagagggaacattcgtgcctgccttgacaaagaacacggcaaaggctatactataaacagaaggacgctgactgcacaggtcagctttccgtcccgtattagtcaaaagattgaccgctcaggctggaactctggaggcggtcaatcttttttgttgtcatttttcttctgcgagttcttatccatgacctcaacggtcagacggatcacttccaaaatcagtcccaacagggtgagaatgaccatgagaagattcaggacttctgtcagattcaaacgatatccctcccttcgccttcaaggcgcagggaagttttcttcaaaaaagtttccctccctgaacctctgcttcgttccatgtacaggaagaatcagcgatacgggacagaaagcatgaccaccaatgatgcaatcagcgtcttatgggtagaataacataaattattgcgaattgcaataaaaaaggttatgcttacagctccagctctgcccggcgtccggtgggcttatagggggtcagccggacaccggcgtgctcgaacatgaaccgcgccgcaatgctggaatcgctgtcgtgatacttgtcgccgtagtacaccacctcggcaatgccggactggatgatggccttggtgcactcgttgcaggggaacagggtcacatacacccgggcacccttcaggttgttgtgggcgctgttgaggatggcgttcagctcggcatggcagacgtacatatacttggtctgcagaggggcaccctcccgctcccaaggcatctcgtcatcgctgcagcccatgggcatcccgttgtagcccagagaaaggatcttgttttccgggcttacgatgcacgcacctacctgactgttggggtccttggagcgcatggcggtaagcagcgcaatgcccataaaatattcgtcccagttgatataatcctcgcgtttcatcgcgtaaaacctcctacccctttatgcgggtctgcggcttgacaaacccggaaaaatagactatactacgaatagaaagagcgctgcccggcaaaacggctccgctcctcatggatcaaatgaccaaaagatcaagtgaccgtggcttggggaagcgctggcggtcactttttctttttgtcgttgtcatggtgtttttctctctgctcgagtttccatgtgatttcaaaggtcacatgtacgatggtgacgataagcgtcagaagcatcagaatctcggagatcgacatctaacatccctccttccaccgaaagcatcaggagagatcacttcaaaaagctgccctcctgacacctgcttcactctggggtgaatttgcagaaccagtgaggacacagagccgccttgcgttttgggtcaacgcccttaccgccgaagcggcacttacagcatatcacaaaacccgcatatttgcaacgaaaactcccggttctgcgcctgtacgcgctgccgggagttctgctttttctgcccgtccgttttacaccccaatgtcaacttgcacaaaacagtgcccggaagtttggcaggcgtttttgctaaattttgaaacgatatatttaaaaatcgtttcggatgtggtattatctttgtaaaatatgccacaaaaacggagagaacgctccgtgcggcggaaatgagggaaaaaccgatatgaaatacgcaagcaacaacatccgcaatattctgattgccggccatgccggcagcggcaagaccacgctgaccgaagcattggtctatttttcgggcgctgccgagcgtatgggccgggttgaggacggtaccacgatttcggactttgatcccgaggaagcaaagcgcaaggccagcctgtcggcgtccgttgtgccggtggagtacgagggcatcaagtacaacctgatcgatgcaccgggtctgttcgactttgaagcaggcgagtacgagggcatccgcgccgccgagagcgtgctggtgtgcgtgtccggccgcagcggcgttaccgtgggcgcagaaaaggcgttccagctggcgcgcaagaacggcaaggccaccatggtgttcgtctccaagtgcgatctggaaaacgccaactacttcaagatccttgaggatatgaagatccgcttcggctccaccgtctgcccctgtgtcgtgcccgcaaagctggatgacggcacccccgtgtacatcaacctgttcagccagaaggcctttaagtacgagagcggcaagcagatccaggtagatctgccggacatcggccaccgcttccagggcttgatcgaggctatgagcgaagccattgcagaaactgacgatgagctgatggaaaagttcttcggcggcgagccctttaccaccgaggagatcgtggagggtatgcgcaagggcgttaaggacggcctgatcactcctgtgttctgcggcagcgccgtaaacctgcaggcactggatatgctgctgttcaatatgcacaagctgctgcccagcccggagcacgaagccagcacgctggccgaggacgccaacggcgagccggtggagctgcactgcaccgaggacgagcccactgccgcctacgtctttaagaccgtggctgacccgttcgtgggcaagctgagctatctgcgcgttatcagcggcaaggtgaccgctggcgagccgctgaccaacgcccgcaccggcgaggtggaaaagatcaccaaacccctgaccgtccttggcaagaagcagatggaaaacgacggcatcggtgccggtgatatcggcgctgtggcaaagctggtgagcgcaaagaccggcgataccctgtgcgatgcagaccgcgtggtcaagctgcctgcacccgtgttccccaagcccagcctgttcatggctgttaccgttgccaagaagggcgacgagggcaagatctccagcgcactggcacgcctgatggaagaagaccccaccctgtgctacatcaacaacgccgagacccatcagcaggtcatcggcggtctgggcgagcagcatctggacgtggtcaaggccaagctgaagaacaagttcggcgtggagatcggtctggaagctccccgcatcgcctaccgcgagtccatccgcaaggcctgccagaagcagggacgccataagaagcagaccggcggccacggccagttcggtgacgttatcatcaacttcgagccctgcgacagcgagcaggtggtgtttgaggagaaggtgttcggcggcagcgtgcccaagaacttcttccccgctgtggaaaagggcgtgcgtttggctgccgaaaagggcgtgctggcaggctaccctgtggtcggcctgaaagctaccctgctggacggcagctaccacccggtagacagctctgaaatggcctttatcatggctgcaaagctggcatataaggctgctatgccggaggctggccccgtgattctggagcccatccacaccctgaaggctcatgtgccgggcgacaacaccggcgacatcatgggcgatgtgaccaagcgccgcggccgcgtgctgggcatggagccggacgaggacggcttgcagaccatcatcgccgaggtgccgctggcagagcttgcaaactttaccacctttatccggcagaccacgcagggccgcggctggttcactaccgagtttgcccgctacgagatcctgcccgagatgctggtgcctgccgttgtggagcaggccaagaagctgggcaatctggacgaagctgcagacgactgagccctgaacccctgatttgacatttccccgagcccccgccgacactttttccctctgtcggcgggggcttttttgttcgttattgtgctgaaaaacagagtggttcttttgtcgaaactgcgaatggactttgctccgaggttctgttattatattgccagacaatcaaactagtcgttactcctcgggaggcgctactagcagatccttacagcaccatgggtatggtgttggttctgcattgggtagctgcgtccggaggtttttctttttataggtattttgtttggcaggaagggagcgcgccatgaagctgctgcgtaagatcaataataacgccgctgtggcgcaggacaagcgcggccgcgaaatggtcgtgctggggcgcggcgtgggctttcatcctatgccttatgagttgacagatctctctgtggtctaccgtaccttttacgatgtggacccgcagtattatgagatgctgtccagccttccggaagaagctctgatggcggcggcagacattgcagaacaggcagagatcgcgctgcaggctgagctgaatccaaatctgccttttaccttggcagaccatatcgcctttgcgcaggagcgggaaaaacaaggcatccgtctggccacgccgctgcactacgatgtgcagcatctctacccgcgggaatacgagctggggctgcaggctatggaaacggtgcgcttgcgcaccggcaccgcgctgccccgcgccgaggcggtaaacattgcactgcatatcgtgaatgctgaactggagggcagtgatctgtccagtacacttgcagccgtggaggtgctggacgaggtgaccgttctggtagagcgggagctgggcattgcgctggatcgggaatcttataattacgcccgctttgccatgcacattcagtttctggtacggcggctctcatcaggtaaggtaatggaacagggcagcggcaaaatgctgtcggagctgtctgccgagtatccggcgacctatcgctgtgcccaagcagtggcaaaagagatcgagcagcgccatggctggcattgcagttcggacgaggtgctgtatctgatgttacacatctaccgggtacagaaccgtcagaacgactgattttttatttgaatgtttccgtgctccggagatgcgcgcgtccggccggatacagatagatctatccacacatggaggtttccctatggatcgtgagaaatttctggccgagctttttccgcttattggcgggaaagaaaataccagcctgtgcgagttccgggacgatgccctgtacatcaccctgaaggatgccggtctggcagatgaaagagctgtagcaaagctgccggatgctgtatctgtcagcctgcatcgcggccggctcactgtccgtttcgggaactctgaacagaaagaggaggttccctttatggcgaacaacgaaaaaatgatcaacgagatcctgcgcgcgatcggcggaaaggaaaacatcgtttccgcaacgcactgcatcacccgcctgagattccatctggtcgatgcgaaaaaggcggatattgagactgtaaaaaagatcgatggcgtggttggctgtgtctacagggcagggcagtttcaggtcatcattggcccgcatgtgaacgaggtctataacgacctgatccaggtgaccgggctgaaaaatgagcctgcggtggatgcagagccggaagaagcagaagaaaagaaaaacctgttctctcggttggtagacacgatggcaggcatcgttatgcccatgataggaccgctggccggtgcgggcatgatcaaagcaatcctttcgctgctgacccagtttgcactcgtcagcaaggaatcccagacctaccagctgttctatctggtggccgacggcgtgttctactatatgccgttcttccttgcattctctgccggtaaaaagtttaaatgcaatccctacctgtcgctgatctttgccgcgatgctggtacatcccaactatatcgcactaaagacagcaggcgaggcagtaaagctgttcggcttcctgccggtaacaatggccagctatacgtccagcgtggtacctattatcctgatcgtctacttccagtccattgtagaaaaattcttcagcaagatcacgcctaaggccattaaggtgttctttgtgccgatgatcactatcctgatcacggttccggttggttatgttgtgcttggccctctgggctccatcgttggcacttatctggcaaagggctttaccgcattggatgcctacgcaggttggctggtccccatgctggtcggcggtctgtgcccgctgctggtcatgactggtatgcactatgctttgggcagcgcacagactattcagcgtgcaaccatgggctatgcaacgatcttggctcccggcatggtctgcagcaatatggctcagtcggccgctacgtttggtgtggcgctcaagagcaaaaacgaagagatcaagacgcttgcttctacggttggcatcactgcactgtgcggcattactgagcctacgctgtatggtatcggcctgaaatataagaccccgctgtacagcgcaatggctggtggcgcattgggcggcctgtatgccggcatcatgcacgttaagcagtgggcctacggcacctccaccatttttgcactgccggtctatctgggcgaggataactcgttcgtgcacatctgcattgcagtggccatcgcaatggtcagcgcactgatcatttcttatatcaccttcaaggatcctgtacaggagaagtaagctatgcaatttccgaaagactttttgtggggcggagcactggcagcaaaccagtgcgagggcgcttatctggaagatggcaaggggctgagccagcaggatgtgatgccgcagggtgtgcgcggcccggtgacggagcgaccgacaccggataatctcaagctgctgggcacggatttttaccaccgctatccagaggatatcgcactgctggccgagatgggctttaaggtgttccgtttctcgattgcatggagccgcatctaccccaccgggtttgaacaagagcccaatgaggccggattgcagttttatgacagggtcatcgatacctgcctgcactatggcatccagccgctgatcaccctctcgcactatgagatcccgctggagctgtgccgtcggctcgacggctttcgctccagagaaactattgaccattttgtgcgttatgcaaaaacggttcttgctcgttaccacgaccgtgtgaaatactggctgacgtttaacgaggtcaatgtgaccctgatttcgcctctgatgggagccggtatcatgacccccaaggcgcagcttaccgcgcaggactggtatcaggcagcgcatcatcagctggtggcgagtgcgctggtcacagagtacgcacatcggctcgacccgaccttgaagatcggctgcatggcagcctctgcgccgcgctaccctatgacctgcgcgccggatgatgttatgacaatgatgctttctcagcaggaattggattacttcatcacggtgcactgtacggggcagtacccttactacgcacagcggctctggcgggagaacgatgtccggctgtatatcacggatgcagaccgcgcagcgctgcagcatacggtagactttgtttcgttcagctattacagcagtaaggtggtggctgcggacgagagcaaataccagatggcaaacggcaatgtgatgcgcggactgaaaaacccgtttgttccggtgtcggactatgattaccccatcgatccggaggggctgcgctatatcctgaactatctgtatgaccatttccacaagccgctttttgtggcagaaaacggaattggcgcaagggagcagcttgttaccctgccggatggcacccgcacggtggaggatgatgcccgcattcagttccatcgggggcatattcaggcaatgaagcgtgcgcttgcagatggtgtggaggtttttggctacaccagctgggggccgatcgattgcgtgagtgctgcttctgcggagatcaccaagcggtacggctttgtctatgtggatcgtgagcaggatggctccggtacactggaacggttccggaaaaaatccttctactggtacaaaaaggtcatcgctaccaatggcgaggatctggactgagtcaatgcttcacaagcgctaaaagttaatacgagccccccgccgacacttttttccctctgtcggcgggggctttttttgcgtttgtgacgtgttttttgacagaactgccaaaaaaccagaccggaattcgtcatctgcacttttttaccagatttttcaagaaatagtttacactatggcagaaatggtggtattatataaaatagtgtaatatggggtaaaatgcgcctgtatacgctgggagggtatgggatgaagaataagatctcgcgccgcagctttctggcggcggctgcggtctcggcagcggcactggcagtgtccggctgcgatgcaaaaaagagcaaaaaagaagtgaccgacatcacggtgtggaactactacaacggcgaccagctggaaagcttcaaccgccttgtgagcaccttcaacgagaccatcggcaagcaaaagggcatccgggtgacaggttccagtcagggcacggtgaacgatctggaagccaacgtgatggacgctgcagaaggcaaggtgggctctgcggagatgcccaccatttttgccgcctacgcggataccgcttataaactggatcagatgggcatggtggtggatttaaaggactacctgactgaggatgaaaaggccgcctttgtgcccggctatatcaccgagggcgattttgacggcagcggcagcataaaaattttcccggtggcaaaatccaccgagctgatgttctttaacgataccgactggcagcggttcgcaaaggaaacctttgtgcgttacggcgctctttccaccatggagggcgtgacggcggtagccgagcagtactacaactggtccggcggcagggcactgtttggcagggatgccatggcaaactatatgattgtgggagcaaagcagctgggctgcgaaatttttgaagtgcacaatggcaaaatgaccctgcacttcgaccatgatgtggtgcgcaaactgtgggataactactatgtgcccttcgtcaaggggtattttgctgcgaatggccgcttccgcagcgatgacgtgaaaaccggcgcactgctgggctgtgtaggctcctgtgccagtgccaccttctttccgaagcaggtgatgcccggggataaccaagtccacgatatcgagatgaaggtgctgcctgcgccccggtttgccgggagcgaaaaggtggcggtgcagcagggtgccggcatggtggtcaccaccggcaccgaggccgagatcaacggcgcagtcacttttttaaaatggttcaccgagccgcagaataacatcgctttcgcggtggagtcgggctatctgccggtgaccaccgccgccaacgacatggacgccatccgcgcaagcgggctggaactgaccgacaccatggagcaggtcctttccggcgcggtaaaaacggtgcgcgaaaacgagctgtacacccctacggcctttgcaggcggcaatgcagtccgcaaggtgctggaatacagcatgggcgatcaggccagtgccgaccgggacacggtgctggaacgcatcgccgcaggccagagcgcggaggcagccatggcagagtttttgaccgacgactattttgaggcgtggtatcaggctacccttgcacagttacagcagtacgagggctgaccgcccggaaaaagacggaaaggaggcagggcgatgtttgacgcatggaaagagcgccagcggcagcgcttgaaaaacagaccggaaagaaccgtgttctacaatatttttgctaccatgatgctggtgctggcggtggagctgctgatggcggtcgccagcatccttgccgtcaacgtgaccggacagctggacgaaaacgccaaggatctgcttaccatgcgggtgcgcaaccgcgccagctatgtgcaggagattctgcggaacgcggaggatctggagcagctgagcgagcagatcaccgccaccacccagcagctgctgaaaagcggcgatatctcgctggatacgctggataacagcagcgaacagagcgatgccctgctggtagcgcttgccccgcagcttctggacaccctgcgcacaaagcaggtgaccggcatctttatcatgctgaacacccatgatctggacacctgcgaggtgggcaaaaaaatgcccggcatctacctgcgggatctggacccggatgcccgcccttcggagcgcaacaacgaccttttgctggaacgcgccagcgccacagtggtaaaagagctgggcatcggcacggataagggctggcagcccgctttcccctatcagggagataccaagggcggcatcctgcgcacggtctttcagaccgcgtataagagcggtgccagcctttcggcagaaagctatggccgctggaccaccaactcctactgtctggcaggggacgaccggcacgccattgcctactcgatgccgctgatcttaccggacggcacggtatacggcgtggtgggcgtggaactgctcacggagtatctgcaaacaaagctgcctttcaccgagctggacgaggacaaggcaggcacctattttatcgtgaccactactgatgatgcgctgacggacggcgtgctctccctgcgcaagaccgtgacctccggcgaggatctggtaacggcagatgcaccgctgggcgttttgaactgccgcagcaacggcaccggcggcaactgggtggagctgaacgataagcgctattacatggtgctggagccgctgcaggtgtataaccgcaacgcgccctttgccgctgaaaagtggttcctggcaggtaccatggaacagtcggtgctgctggctttttccgaccgggtacgcgagttgctgctggccaccatagtggtcacactggtgctgagcgttttgggcagtctgctggtctcggcacggcttgcccgccccatcaaccgtttgtaccgcgaggtgatagacgcgcaggagaaaaagaccttcccccgcctgtcccgcaccgccatccgggaggtggaccgctttgccgagaccattacccagctgaacaaggagctggtgaccaactccaccaagtttttgcgcatcatggatatggccagtgtggagatcggcggctacgagctgcgcaccgacaccggcagcgtgtttgtgaccgataatttcttctccctgctgggcaagcccgagatgcagggcaagccgctgagcgtgcgccggttcgaggaggtgctcaagggcatccgggaaaagaatccctgtgaccacaccgccgagggcgacgagcttttgaccatccagcagccggacggggtgcggtacatcatgctgcgcagcaccatcgaggggcacgccaagatcggccttgccgaggacgtgaccgccgctgtgctggagcggaagcgcatcgagcacgagcgcgatcatgatatcctgaccgggctgtacaaccggcaggccttcaaccgggtgtgcaccgagctgtttgccgcgccggagcgcatgggcgtggcggcgctgatgatgatggatctggataacctcaagcacatcaacgatacctacggccatgactggggcgaccagtacatccgccgcaccggtcagtgcctgcgggacaatacccccgccgggactgtctgcgcccgtctttccggcgacgagttccttgtgctgttccacggctaccgcagccgggacgcagtgcgggaaaagatcgactgcctgacgaaggctatgcagcagagcgtggcgctgctgcccagcggcaacgccttgcacatcagcctttccggcggcatcgcgtggtacccggacgatgggcaggactgggagaccttgaaaaaatacgccgactttgccatgtatcaggtcaagcacgcggataagggccgggtggaggagttcgacatcggggtgtacaaccgcgaagcctacgccgagcgcacccgccgggagttccggcagctgctcagcaatgcgcaggtgttctattgcttccagcccatcttctcggcacgcagcggcagggtggtcgcctacgaggcgctgatgcgctccgacctgcccaccctgcgctccccggccaccatcatgaagctggcgcgggagcagggggcactgtacgagatcgagcgcatcacctttaccaaggcgctggagaccttcgacagcctgtgccgggcgggcagcgtgtccgaggaggccatgctctttgtcaactccatcgccaacacctgcctgtcgcatgaggacggcaaatatataaacaaccattggcacgagctgtgccaccgcatggtcgtcgagatcaccgaagaggaagctatcgactacgaagcactggagaaaaagcgcaatgcaccgggcttttccgggatgtttgcgctggacgattacggcagcggctattccaacgagaatacgctattgcagcttgctccccggttcatcaaggtggatatcgccatcatccggggcatcgatacctcgccggacaagcagcagatcctgcgcaatgtggtggcctacgcccacccccgcagcatgaagatcgttgccgagggtgtggagaccgccgccgagctgcgcacggtcatcgagctgggcacagaccttttgcagggctattttctggcacgcccggccattgtgccgggggatatcgcgccggaggcagcggggatcatccaggagttgcagcgccggaaaaaagactgaaatatatgccctcccgggcgctgcggcgctgggagggtttttgcaacggaggtaaaaagatatggttcaggtggatctcatcaccggctttttgggcgcaggcaagaccacctttctgcgccgctatgtgcggtatctggtacagcagggacataaggtgtgcattctggaaaacgactttggcgcggtgaacgtggacgccatgctggtgcaggaggtgctgggccccggctgcgatgtggagaccatcagcggcggctgcgactgcgacacccaccagcgccggatgcgcaccaaactcatcgccatggccatgcgcggctttgaccgtgtggtggtggagcccagcggcatctttgatgtggacgagtttttcgatatcctgcgggacgacccgctggaccggtggtatcagctgggcagcgtcattgccattgtggacgcccttctgccggaaacgctttcgccgcaggcagagtacctgctggcctccgagaccatgaacgcgggctgcgtgctgctgagccgcgcccagctggcagcgcccgcccagtgcgccgccgccgctgcccacctggagcgtgcattggaagccgcaaaatcttcccgccgctttgcgccgggggagatccttgccaaggactgggacgccctgaccgatgccgaccttgccgcccttgccgtctgcggctaccggcaggccagttgcgaaaagctgcattttgaccagcatgcggctttcagctccctttgctttctggaactgcacctcaccccacagcagctgcaagccgccgcacagcggctgttcgacgcaccggaatgcgggcgggtgctgcgggtcaagggttttgcgcccgccccggcaggcggctggctggagctgaacgccaccgccgccggctgcacccttgcgcccatcccgcaggggcaggaggtagtcatcgtcatcggcgaggcactggataaagccgccattgaagcaaacctgaaggggtgaaaggcagttttcccccataacaaaacgcattgtggaaaaacaggagggagcatcatgcaggaagtacgcgcagccgttattggcaccggggtcatggggcgcaagtatgcccagatgatcgcagaaggaaaggcgggggcattgcgcctgaccgccgtggtctgccgcagcgccggggcgcagcagtgggcaaaagataccctgccggatacggtacgggtgtgccccaacgccgaggagctgtacgcccacgccgaggagtttgacgccgtgctggtagttaccccgcacaagacccacccggcgttggtaatgcaggcttttgcccacggcaagcacgttctgtgcgacaagcccagtgcaaacgcgctggcaccggcgctggaaatgaaccgcgccgccgaaaaaagcggccttgttttcgccatgatgttccatcagcgccgctacaaaaagtatatgcggcttaaaaaattactggatgatggggcgttgggcgaagtcaagcgggtgcagctggaaaacagccgctacttccgcacatggatgtaccaccgctccggcagctggcgttccagctgggcaggggagggcggcggcgcgctgctcaatcagggacagcatattctggacatctggcagtggctgtttggaatgccaaccagtatttatgccgtgataccatacggtaagtataacaatttcatggtggacgatgaagctaccctgctgatggagtacccgcagcagcgcacggccacctttatcctttccaccggcgagggcagctacaccgagcgattggagatcgtgggcaccaagggcaccgccctgctggaagaggataccctcaccctgcgcacctacgcgccggacaccgagacctaccgccgtaccgcagactgcaccgagcgccagcagcttaccgagaccaccaccaccgagcagtttgcaccgcaggcagagccttacccggagatgctggcaaactttgcggatgccatcctgcacggcacgcccctgaccgccccaggcgtggagggcgtgcgggcgctggaactgaccgatgccgcctacctgtccgcatggctgggggagaagatcactctgccgctggacgcagactggtttgaacaggaactgcaaaaacatattcaggaggaacaggcaaatggctaagctgcggtttatcgtagtaggctccggctggcggtcgctgttttactggcgcatcgcgcaggcgctgccggagcggttcgagctgtgcgccatgctttgccgcaccgaggaaaaggccgaaaaaatgcaccgggagtacggcgtgccggtaagcacctcggcggagcagtgcgctgccctgtacccggaccttgtggtggtggcagtgaataaagcgtccatcgccgccgtcagcaccgaatggcttggccggggctttgccgtgctgtgcgagaccccggcggcgctgaacgaggacgcattgcgcgccctctggcagctgcaccggcagggcgcaaagctgcaggttgcagaacagtactggctgtaccccacgctggcaaaacggctggcagcagtgcgcagcggtgcactgggcacgccgcagtttgcccggctgtcggtggcgcacggctaccacgcggtcagcttggcgcggcagttcctgaatgccgggcagcagccggtgcgagtgaccggacgcagctggacggaaaagatcatcgaaacggattcccgctggggtgcggtgcataacggcgcattggtggaaaagaccctgcagcagcacacgctggaatttgcaggcggcggcacggcgtttctggattttaacggcgtgcagtaccactcttacctgcgcagcacccacaccagtgtgcagggagagcggggcgagctgttcgatgataccctgcgctgtctggatgccgccggagagccggtgtgccgtctgctgaccccgctgcctgacccgctggcagctgccgccgcacaggcagggcttaacgaggacgagactgccatcgcctgttttctggacaggatgcagggctatcttgccggcggggcggaggtgtacccgctggcagatgccttgcaggacgcctaccttgccctgctgatggagcgcgcccttgccgccggacagccgctggaaagcaccccgcagccgtggaatacggcagaagaataacgaaaaaacggctgctgcacgggagagtgcagcagccgttttatcttatgaaagcttaaaccttgaacagcggagtgccgggtacaacatcgccctcggccagcatcttcacatcgtccgcgccatcggtcacgatgatggcggttgcggtgggatggccggctgcgcggatggcatccagatcgaccttcagcagcggagtgccggcggtgaccttctggccctccttgaccagtgcggtaaagccctgacccttcatgtccacggtatccatgccgacatggatcagcagctcggtgccctcgctgctggtcatgcccacagcgtgcagggtggtggcgatctgggtcacagtgccgtcaaagggagcgtacacggtatcaccggtgggctcaatgccgcagccggggcccagaatgccctgtgcaaaagtctcgtcagggatgtcggcctgtgccagcaccttgccctgcagcggcgtcaggatcgtcttgctctggttggtgaatttgctggtgttttcgtccttggccttgccgccgaacagtttgtcaaaaaagcccatggtgaatgtccttccttcttaatcaatgttcaaaagcgacaagggaactatcggatctcaacctgccgctcccgaaaacgatacctatatataaaagataccatatcatcctgcaaaaagcaagaagcaaccttacataaagcagtgcgttacatcagcgtaagcagcgcttccacctcgtccatgcgggtggcccagctagtggcgatgcgcaccacggtatgggtgtcatcgaacttctcccagaaaccgaactttgccttgcccttcagtgcagccagctgggcattttccagcacaaggaagatctggttggtgggggaatccataaagaagcggtagcccttttccgcaaagccggccttcaggcggttggccgtggcaatagcgtttttgctgatggaaaagtacagatcaccggtgaacagcacatcgaactggatgcccagcagccggccctttgccagcagtgcgccctgctgcttgaccatggtcataaagtgtgccggtgcaccgtgggggaacaccacagcttcgccgcacagcgcacccaccttggtgccgccgatgtagaacacatcggtcagccgggcaaggtcggccagcgttacgtccgtaccctcggcagccagaccgtagcccagccgtgcaccgtctaagaacagcggcagcttgtactcctgacagacagcgtgcagggcttccagctctgccttggtgtaaagggtgccgtactcggtggggtgggaaatgtacaccatgccggggaacaccatgtggtcgtgattgtcgtcggcgtagaaggtagccaccagttcccgcagctcggcggcgtccagcttgccgttgtgctgcggcagggtgatcaccttgtggccggtgtactcgatggcaccggcttcatgaccggctacatggccggtggcagcagccactacgccctgccaccgctgcagcatggatgcgatgacgatggcgttgctctgtgtgccgccggagatgaactgcacatcggcctccgggcaggcgcaggcggcgcggatcttctcgcgggcgctggcgcagtaggggtcggtgccgtagccggagactttttcaaagttggtctcggtcagcttttgcaaaatagcggggtgtgcaccctcgcagtagtcgttttcaaaatacagcatggcaaaacgctcctctatgttattttaaacaaagcagtagctctattctacatcgcagaaaaaactctgtcaaatccaaaacggtgcacagtacacgcaatgtgctgcagaatgtttacaaatgccggaaagacggcaaaaaacgcttgcgcagccgacaccgtaaccgcactgcctacaaaaaatgcgaaagtatgatcctttccaaaaagatgaaaagtttttgaaaaagtgcttgacaattttgctgcatctggtataataactatcgttcccggcgcttcggtgcaggaacacaacagaatatgcggatatggcggaattggcagacgcgttagattcaggttctaatcggggcaactcggtggaggttcaagtcctcttatccgcaccatgacgaatgttcttacagcatttagctgtcaaagaacattcgtcatttttttatttgctaaatagcgacatcacagggggcgtagttcacaactacgccctttcttgtattcactgatacatcgggtgtcggtaaaggaagtgcgcttggaatctcgatggtgcccacgcagttgtagtgaatgcggagccgctgctcccatacaccattgaccttttctgcattgaacacttcgattttttccaccagttcattcagcatccggggtgtcagcttttttgctctggtgtacttgcgaaccagactgataaacatatccgttgtcatagtgcagctgctctgcttttcgatttcggagcggagctgtttgattttttcggtcagctccttttgctcgtcctcatatcttcgggacattctggaaaagcgttcatcagagatcttgccggaaacattgtcctcatagatgcgctcaaaaaggccgtccagttcttcatcacgggcaaggagtgctttcaactctttctctttcagcttgcggtcggcttcgtccgcctgctgggagtgcccgataatagccttcaaaaagtcgtcctcatagaggctggcaaacttggtcagccgccgaatctcgcccagcaccacttcttccagaaagtctaccctgatgtagtgggtggattggcaggtgccacggttgcccttatagttggagcagttgaaatacctgatttccgggttgccctgattgaagtggaagtgcagattgcagccgcagtctgcgcagacaagcaggccggagaacatattgtgttctccgttgctggtacggcgtttgcgcatctttccacgcttctgctgtacctgctcaaacacggcacgttcaataatgggttcgtgaacatcttggaacactacccaattttccgggtcgttatgaatccgcttcttattcttgtaggacttggagtaggttttgaagttcagaacatcaccacaatactcctgctggtacagaagatgggtaatcgtggagccattccacttggtggcggggcgcgtcttggtctttccgggacggccgatgcctttctgaatccagtaggcctgcggcgtcaggatgccttccttttcaaactgggtggcaatctgttccgtgccaaagccctccaacgtcatatcaaaaatgcgccggacaacttgtgcagcttcttcatcaatgacccaatgcttgggattgttcgggtccttgatatatccatagggaggaagtcccatcggttcgccggagttacctttgattttattactgatacggcgtttcttgctgatgtcgcgggcataccactcattgaacaggtttcggatgggtgccagttcgttttctccctcggccgtgtcgatgttgtccgaaacggcaacaagtcggatgtcatggtctgggaaaaattcttctgtcagccgtccgacctcaatatagtttcggcccaaacgggaaaggtctttgacgaacacagcggaggctttcccttgttcgagctgctgcatcatttcaacgaaaccgggacggttcatggtcacgccggaaatgccatcatccagaaagtgaaccagattggtatagcctttttcctttgcaactttggtgagcagtttcttttggttgccgatgctgtaactctcgccctccaaattatcatcacgggaaaggcgctcatagagaaaagcggttgcttcacgggatttcttgttactcgactgtttcatactcgctcctttcttgggacagtcgaatagcaaattcacttgtacacctatattataacacaatccgctttctctgtccgctgcctcccgaaaggtcattataatttttcgctttcggatttcatcagccggagaagaacttctcctaaggtctgggaactttcttctttgaacaccggctcaacgataaaggagcgattgccaatacgataagtcgaatccagagtaagcatctctggattttttgttttttcagggtttgtctttttcgcttgcatcgtaaaaatcccctttcttaaaaatcaaaaaatgagccaacggacggctgctggcagcagcccacgggaatctcacccctgcattcctcatgcagccctactcattgcctgcgacgctctgaacgctcggactttgacggtaagggagtatcagcctgtctgtatgtcatggcccgcaagcagccgcacttgcattgcggcgtggttgtgatcgctccacttttcaaagaaaagcatcgtggcgcacccgccgtccggctcgatacagacagcaacgtatccgtttgccctatgatgcgccgccgttatcttacgggctttctttatcaaggaacaataaggctttgtcagcctgtaaaagcataccgtttccgatatgcttttacggaacgacaaacagcccataacgggaagcgtggaaaggggtacacgctccccacatgggcttaaagagttagcctacatgaaacgcaagagtgcgggtaataaggcgcacttgcagcctgttacgcatttcttcgtccacataggagtaagtattgcccgcgtcgtctttcagcgtgcgggtacaaagtttcgctatgtaaccctcgtagtgcttcaagatcgcgcacatggcggttgtgtcgccgtttgccgctgcggaaatgacagggaacggcaacagattttcagacttcctaacggtattcatcatctgcttttccctccaaatactgtttgattttcgcaagcgcggatttcctgtgccggaaaaccgtcgtgcgtacaacattcagcagttcgccaatttccgcgtcgctcatatccaagaagtaggacaaaaggataatgtcgcgtttcctttcgggcaaagcgttaagggcttcggcaagcagttcatttttgacgagtacatcaaagccggacacttgaaaacggaaataatcgctttcgtattcgtccgttgtgaaaagctgcgcgagttcgctttcgctcaaatccgaaaaagtaacttcgcgtgctgcgcgtttcgcaagagtgcggcggtggcttttcgcttcgccgaccaaagttttctttgctaatgcgtcgtactgatgttgtattctttccttgtcggaagaagatagctccatagagttcacctccttcccgcgtggagtagaggacgggagttaagggcttgtcctctctgcccctttcgctccgtacccgttcgggagatggctcttgagtgcgcttttcagaaaaaagttgaaaaaagcaaaatgcgcccgtccgcaagacgcggacgggcgcaaaggaaatgtaagcagtagctaaatgtattgacagttcacattcatagccggaatatcccgcttgcggagcatagctttttttgaccgcaaagcattaggcgggttacagtaaataaaaatggacacggcgatacctccccgataccgccgtatccttaaaaaagggcgactttaatacactacccgcaatccattctataatagggaacagcggcttttgcgcaatattaaataaaaaagccgataacacataggttttttgacctaatgcgttatcggctctgcgtctatgcgtctggcacttttaatcatttttttttgaatttattatatgtgttagctaactgtccacaagccgcgttaatctctctgccatgagaaactctcatagtaacttcaagtcctgcttgctctaattgatgtttgaatgcaactatttcccgtttctgtggtgctttaattcttgaattgcttgttgggttgtattgtaacacgttaatcataacttttttgccccgaaaccattttgcaagttgtcttacatctgagggccggtcatttatacccggtaaaagcaaatacgcaaagacaattttgcgattatgcctttcagaataggataaggcttgcttaacaacatcttcaatagcatatatgcgcatgtgaggaataatacgatttcttgcagattgtgttgctgcgtgtaaagatattgtcaactgaattttaagatgttcctcgcgcaatttttttaattgatcgaccggaccaactgttgatatggtaatgccgtcggttggaaagttgagcccatatctatctcggagaatatggattgcttttatcaagttgtcataattgaataaaggctctcccatacccataaaaacgatacggtttacttttcgacgcaacaatataatctgttgtacgatttctgacgatgttagattacgaacaaagccatttcgcccggactcacaaaaaatacaaccaacaggacaaccgacttgtgtgctcacgcaaacagttccaccatctcgccgcttgataaaaaccgtttcaatgtatttgttgtctttcagttcgtaaacatacttttcagtatcactgcttttgcaaatattttttaccaacattgatagattttttttgcgtggtaattgcttatataattcttcatataaggcttttgcttcattctcgccaataacttccgacatttctttgtaagtaaatccgtatggatcattccgtacttccgcaggcgtatatttaggtaaacgtttcatttttatatcctttcttctaaataataaaagtttgtttttctgtatttttgattacaatctctaatttttctacatcaatgatatgcgtcaatttgcatttagggcagaaaagaggaaaatcttttaatacagtattatgaaatacttgaactctcgtctttccgttacaaatcggacattttatccaatattttttaagcattatatttcactcgtcctttttacacaaaaaaatgcaggtcaatcctcaacatgagcattgacctgcatttataatgcacagagcagtacaacaaaactaaggcatagcttgcactatgtctatactatatctatacgtcgttagttttttgtatagcatccgcaaaataagcatgacaaaaaagcccatgttgaaaatgggaaaatcctttttttcaatgcttatctaatacgcatgctatgcaacataaacgccgcctccttttacattaattttattttatcagaaaatcagtctactgtcaatacacaacaggaagtatttaacctaatgatatgaattgtgtggacatatccaaaaagaaaggtgaactgtaaaatgtaacagggtgaatgaaaatggcaaaaagacccgtaccattgtacgactttaaggctttcggggcagctataaaagccgcgagaaatgaatacggcgagagccgcaaaaaggtaagcgacgagttatatatttccccgcgctaccttgcgaatatcgagaacaagggacaacagccgagtttacaggtattctatgaccttgtaacccggtatcatatttcggtagatcaatttttcttcccgaacagcaatgcggagaaatccaccgggcggcggcagcttgacgcgctgctggacggtatgagcgataaaggcatacggattgtaaccgcaacagcaagggagataacggaagtcgaaaaagcagaggattaacctcacaatatgagaaatcgggagattgcagcgcatggcggctgcaatctttttttgcgtccaaaatcaaaggaacgcgcaacaaataccgcctttcggtgggggtatggagtagatagcaagcatagggagtgtagccactcccggcaaaaatgcttgctggggagtaccccagacccccaagaaacgaggtgaaactatgacgaaccgaacccgaaaaattgttctgcgtgttcccgtgacgccggaggaacgggaacttatccggcagaagatggctctgctgcacacacggaacttttccgcctacgcccggaagatgctgatagatggttatgttgtccacatcgacactaccgacatccgggcgcagactgccgaattgcagaagattggtgtcaacgtcaatcagatcgcgcggcggctgaacagcatggggccgctgtacacacaagatgttgcggacatcaagggagcattggtgcagatatggcagttacaaagatacatcctatcaagtcaacgctgaaaaaggcactggactacatcgagaatccggccaagaccgatgaaaaaatgctggtgtcctcctttgcctgctcctacgaaaccgccgacatcgaatttgaactgctattgtcacaagccatgcagaaaggcaacaatctggcccaccacctgatacagtcttttgcacccggagaaaccacgccggagcaggcccacaagattggccgacaacttgcggatgaagtgctgcaaggaaaatatccctatgtgctgaccacgcacattgacaaagggcacgtccataaccacatcatcttctgtgctgtggacatggtgaaccaacgcaagtatgtttccaaccgacagagctatgcctacatccggcgcaccaatgaccgactgtgcaaggagcatggcctatccgtggtaatgctcggccaagaccggggcaagagctatgccgagtgggacgcacaccgaaagggcacaagctggaaagcgaagctgaaagctgccatagattctgctatcccgcaggccaaggattttgacgattttctgcggctcctgcaggagcagggctatgaggtcaagcggggcaagtatgtttcgttccgtgcgcccggacaggaacgcttcacccgctgcaaaacgctgggagaagcctataccgaggaagccatcaccgagcgcatcaaagggcggttcgtggagcggaagcccaaagaaacccgtagaatttcgctgcggattgatttggaaaacagcatcaaggcccagcagtccgcagggtatgagaagtgggcaaagctccacaatctgaaacaggctgcccggacgctgaacttcctgacagagcatgaaattgatagttacccggatttggaaagccgggtggccgagatcaccgccgccagcaccgaagctgccgccgcattgaaagcagcagagcgccgacttgctgaaatggccgtgctgataaaggatgtcaccacctgtaaggaactgcacccactgttgcaggagtatcagcaggctgctgacaaaaagcagttccggcgcaagcatgaaggcaccctgattctctatgaggccgcagccaaggccctgaaagagcagggcttccaaaagctgcccgacctctacgcgctgaaagccgagtataagctattggccgagcagaaagaccagctgcaacagcagtacaatgatgccaaacgccagatgcaggagtatggcatcatcaagcagaatgtggacggcattctgcggacagcaccgggaaaggagcagatgcaggaacggtaaatctgcacaaaatattgttcggatttttgaatcccaaacgcttagaccgggtggcgtttccacccgaaatcatgtaaaatagacttagacaacgaaagcgagggaccctctatggcagaagtgaacgataacagctctatccagctttttgaagatcagaaaatccgcactgcatgggatgcagaaaaggaagaatggtattttgccatcgttgatgtgattgctgttctgactgacagcgcagacccacagaactattggcgcgttctaaaaaagcgtcttaaagacgaaggaaataaaaccattacaaattgtaatggtttgaaaatgaccgctcctgacggcaaaaagcgcaaaacggatgtcgctaacactgaacagctcctgcgcatcatccagtcaatcccatctccgaaagctgaaccgttcaaggcatggctggcaatggtaggcaaagaacgcatcgaggaaacaatcgacccggagcgagccattgaccgtgcgcttgatacctatttgaaaaaaggctactccgaagaatggattcatcagcggcttttggcaatccgcatccgaaatgagctgacggatgaatggaagaagcgcggagtgcaaaagggcaaggagtacgctatcctgaccgacgaaatctcccgtgcatggtccggcatgaccacaggacagtataagcggctgaaaggtctgacaaaagaaaatctccgggataacatgactgatttggaacttgttttgacgatgctggccgaagcctccaccacggatatttccaagactgcaaaaccgcagacctttgaagaaaacaagcaggttgccaagcgtggcggcaaagtggccggcattgcgcggcaggctcttgaagcggaaaccggcaaacccgttatcacggaaaagaatgcggttgacttccagcagcttgtaactgacattgtagcagatgccgccgaactgccagatcagtctgccgaaaagaaagacgaagaatgagaaaggatattggtagatggataaatttgaaagtttactgacggaaaagggaatatacggtaaagtagaggtagatataagcgatttgcctgatatagaaaaatatctgtcgggtagtcttaataagggtaacgtcattgattgttattgccctacttgtaaagcaccacggtcttttgaatttttcgatagcgaagtacatacggggactggaatggtgagaatagcccttccaaatcaacccactcgtggtagactccccaaggccacagagagattccaacgttatctggggcggcgttatgttctgacatataaatgtacacgagatggaaatcaaacaattttgtttgatttgattttgaccgattcagaacttataaaagtgggtcaatatccgcctagggcaattttggataggtcaaaatttggcaaatacaaaaagttgctaggagcgcagtatattgagttgacaacggcggtttggcttgcggcagagggaatcggcattggttcttttgtatatttccgtagaataattgagaatttagtgtttgaaaagtacgctgagcataaggaatcccttgaaattagcgaatgtgatttttcaagattaaaatttgataaaaaaatcgaaacactaaaagactacttgccagaggcattggtaaaaaacaaggcaatatatggtattgtaagtaaaggaatacacgaattgagtgaagaagaatgtttggacatgttccaacctcttttaattggaatcgagttaattcttgatgaagttttggctcaaaaggaaaaagaaaaacgcgaaaaagaactccaaagttttatatcaaagaaaagtgaagaactgggataagtaaaatagccggacacagcagccacaaggccaccgtgtccggctatttctgcacgacaatggcacattacttttgctgaaaataatgtgtagttgtcaagcgatcagtatcactcactcgtaaaatcgaatctctgtccgtcaaagtcagcatcagtcatgtgctccaactttgcaatggtgccatttgccagccgccgcatttccgtgtccatgtccggcagggcagcccgcatccgtgccatcgtccggcggcggtcagaagtgtggtacatacagatcaaattttcttcttcaacgctgaaattcatggtcagacctccaattcttttgtcttttcccgtggcggcgtttgtttgctctgctccttttttgcggcatccagctgtgcccggatggacggctttttcggttttgcggcgcgggacttcttggctttcggtgccttttcctcggccttgactgcggcggcaaggtccgtcagagaaatttgttctccggcctttgctttggcttccagctcacctaaagagggcgcattgttcagcacaccgtcaatcatgttttcattttgttcggtggaaagttctgcggtgcgcagcggattttcccgcaagaactccggcacctgctgaaagcctacgctgtcgcagtagtgggcggtgtcctgcccgttctggtgcagcaccactacatccgaaacagacagcgagtgtcccttgaagtctgccggatggttcacattgaacgtgcggtagatgtcctccaaggtggtaccagcagtcagcggcgcggcgtaaacttctgtatagttggccttgtccacggtcaaaccggcagcctgcaggcggtcgtagggctcaaaacggtaatcgcgggtagaatcttcattgcgcagctggtagatggaaaaactgtcctgctgcggtgcttcaaagcctgccgctgcgtattcctctacggtcattccggcagcagccgcttcctgcgcgatctcggcctgcacctgtgccttgtaatcctgcaagctctggtcaaagtcagccagcttgggcggttccggcaagttatactggccttggttaagcagcgggcggcagtcctgcacataggccacaacagtgttgtaataggcagcctgttccggcgaaatgttctgtccctcctgcaaggcggtggtggcggtttgctccatggccgaaagattgcaatgttgtttgaggtacgggataaactcggtcagcaccatttcccgctctgccttgtcttgttcccatgcttccgggcccttgttgtgcagcacaaagtttttccagttctcgtctttggcgtagtattcgtggtagctctggatgtgctgaatcagggagccgtccccgtcaccaaaatcctgccgaccctcgtagttgtccggctggccgttcagagtaaaatcaatgcggaacgcggttttgtcgtaccagccgcccgtgtagccgtccttttcccggtccgtgtgctgggcggtgtccagttcttcaaaaacacgattcgccacggacagcggcatggtttcgccgtcctgcagcttgtcgctttcgctccacagaatcgtgaccgtaggctctgcggcggggtctggaattttaacgggtgcgggaatttcgttggccttttccgccgcctcttggaacgctgccagtttatcacccaacagaacttccgacactgtggttgtctgccccagcagattaagtgcttcctgtccggcatccggcagggtcagaccgggtgcgtccagttggccgccgtccagagccttattatccgggccatacagggtgtagtcatagccggaatcgcaggtctggatgaacagcgtattgccattatccagtgcaaatgcggcctcctgtgcagcggaaaggtctgcttcccgctgctggcgaagttctgccagatgttcgtccagcgcggagatcagctcatgggccgcgctgcggataatttccagagaggctttcagttcggccagttcccggccagaactccacccggccacatagccaaaggaatactcggacgtgtccagcccgtagtgctggcagacggcataggccacgctttcggcctgcacctcgcgggtgcggctgtccgggcggttggtctgttccgggtcggtggggtcgatggcgtgaagtttggcgtgggcaatttcatggatagccgtcttgatggtctgtaactggctcatgccctcttggatggcaatgcggttgtcgagcagatgaaagtacccgtgcgccccgccctctatgtcctcaaacccgatgggcaccggggatgtctgctccaatgccttgaaaaaatcttggtagtcctgcacgctgccggacagttcatccactgcgatagatggcagtggttcaccctcagtctggctgacatcgaacacggacaccaccttaaaggccggaatctgtaccgttttttcttcggtcagcggcttgccgtccttgtccagaatcggcttgccctgctcgtccagcttttccatcttctgcttgaccttgtacggcgcaggagcaaggattttgatgcctttttcgcctttctttacggtgcggtggaacgtgtctttccacttgttgaagcccgccaccagttggccgccctgcatggcgatcagcaaggtgttgttgaagctgtaattgtggaatttcgccatcgtggtgaggtaggctttgtagcggtcactgtcaaacaactgctgaatccctgtttccagccggtccgtgatttctttcatccgttctgcgctgtctttgccgttcaggataatgggaataactttctgctgttctgttgtggactgcaccggcggtgggatgttggccgcatcccgcaggatttccgatacaggaaaagacagcacccggtattcctccggcacaggctggccttcgtggactttctgccactcgtccccgcttttgacaaggtagccgtactgggtaaatgcaccctgctcctgctgggccacatagcggccaaactgcgccgtgtcgatgccccctttccattcttctggtatatccaccatgccggaacggttcaagtagtagtctcccagctgggcagggccgcgcacatccggcagatgcacataatattccacgttttcgggaaagtctgtgattttcccaatgctggaaagttcactctgcggggcttgcaaagcggcgttcagctctgcgcgttccccggcagaaagcgtttccagccgtgcggccagaaagttcagctcgtccacattggatgccagcaccatgttgtaagggatggcaaaacgcttttctacctcggcaaagtagccggaaatgaaaaggccctgcggattatcggacgaaatgccgatttgccgcagggccgcttgtacctgttcggttgtagtgggcaggtccagccagacgccatccctgccttgctgctgccgattttgcagctggatggaaaataattcgctcatttggtcacactccttttttgctatcctacggatagagagagccggttattgcaaaatgaatgcttcaccttaccataaccggccctcgtatttttgccttactctttgcgctctacccggtaattgacgtacttgcctcccgtatctgccagaagcaccgttgcatcataggttttgcctgtcttttcggaatagaggcccttgacctttgccttgccgtttttgagcagagtagcggcgatcttcggtgtgaacgcctttttgcgctgctcaaagaagcggtcattcttccacatcacgaactgacagctacgattcccgcagtagaagtttttcttgccctcatagacgttttcactgcaccggggacacttgccgataataacccgttccgactggaacaggttttgcttatctgcactgatacaagaataggtcttgaccagctgacgcacctgcgcttcaatttcggccatgaactcgtccgcgtctgcattgcccttggcaatctcggtcaggcggttttcccattcggcggtcagggcgggagatgtcaggctttccggcagaaccaccgccagattgatgccgtccttggtggggataagctgtttgcccttgcgctgcacaaagcccatttgcaccagtttttccagaatcgcggcacgggtggccggagtgcccagccctttgcgttccgcgtcctccggcatatcctcggccccggcccgctccattgctgacaggagcgtatcttcggtgtaggctttcggcggggacgtgaaatgttccgaaatgtcagccaccgcagaaaaactttgtccctcggccagttccggcagggtgttcagggcttccgtttcttcatcaccgtctgttttcagggtggagtggaatcgctggtcgatctctttccatccggggacaagcaccgtttttcccttggcggtgaactcgttccctgcacaggagaacacagcagtcacagtttcgtactcatggggtgcggctatcgcgcagagcagtttggagcagacaaggctcatcagcttgcactcactttccgcaaggccggtgaagccctgttttacaaattcggctgtgggaaggatggcgtggtggtccgatacctttttgctgttcagcacccggcccacatccggggtaagtgcaagcccttgggcaatgggcagcagcctcagcaggtcagacacaagatgttgtgctgtctggcccatatcctcggtcagatattgactgtccgtgcggggataggtcagcagtttcttctcgtaaagctgctgggcataatcaagggtctgctttgccgtaaatccgaacaagcggtttgcctcccgctgcaaggtggtcaggtcatagagcttgggcggctgttctgtctttttctcccgtttgacagaagtacaaacggtagttgtgcctgtgcatttttctttgagagaatttgcggtttctgcatccgaaatgcgctcactgtctgctttcaggctgccggactggatgccgactgtgtaatacttttctttctggaaacgcaggatttttgtatcccggtccaccagcattttcagtgtgggggtctgcacccggcccaccgtcagggtcttgtgatacagcaccgaaaacagccgtgttgcattgatgcccaccagccaatccgcctttgcacggcagaaggccgattgatacagagcatcatagtccgaatccgggcacaggtttgcaaagccctcccggatggcggcatcctccatgctggaaatccagagccgctttacgggtttcgtgcagccggccatttggtagacaaagcggaagataagttctccctcccggcctgcgtcggttgcggcagtcacactgtccacatccgggcggttgagcagggcacgcagaacttcaaactgctgtttcttctcgtccgggacaatgaactgccacggctggggcaggatgggcaaatcctcataccgccatttgcagtatttttcgtcgtactggccagcctcggcaaaggacaccagatgcccgatgcaccagctgaccagatacccgccgccctgccaatagccgttttgcttttcggtggccccgatcacggcggcaatgctgcgggctacgctgggcttttcggcaattaccagctgaacgctcatgtttcgtcctcctgtccgttctccgaatgaatctcgatttcagccggttcctcgtctgcatcctcgtcctcgccaaaatcgtattcgtccagatcatcgtgcccggtggtatcggccttgggcttgcggaacttgaaataatagagtgccgcgccaccgcccgccagagccagcgccagcagaatcatcagactgcccatgctggacttcggcttttcctctggcgtttcggtgtcagttttcacagcttccggggccgtgcagttgcgcaggctcttttcacacaaggggcagttttcgttgacgttcccggcctcacatttcacggtgcaggtgcagacctcggtggtctgcggttcttcatccagcagggccagcaagtcggcatcgtccacttggttcaggaagtgaacggacgtttccttgtcctcgttggcacggtcaatgagaatgtaataataattcccggccttggtggtcactgtgataagctgcttgtcgccgtaaaagtcatccaccagtgttgcattgcccttgggcgtgatgggcacaccctccggctccatgccgcccgtagtgggttcttcttcgataatctccggcagaggttccggggcagggtcagtaccgcttgcgaaagcgggcatggaaaaggagcagaggcagagcaggatagccagcagtccggcagcgaaacggttccagttgtcaggtttcatcggcggcatcctcctgtttgtggtgcggtgtggcggtgggtgcagcattcagcgcaccgctgcgcaggaaggccgcgaactcgtccggcttcatgttcatgctgcgcaccagctgaatgatctgcaagttttcttgttcagtctttgcagcttccagttctttcaactgctgctggtattcgctgattttttctttgagccgttcgatgtcgcgctcaatgcgggaaagtctttttgccatacaaaatcctttctggcgtcacggtaaacgcccatagctgtaaaaatgttcctgccaatattttgagttgaggtttgtgtaagagatagggtcgccgcagtgcagcatgatggaattgcctacatagataccgcaatggctcacgccgggggtatcgtaggttcccttgaaaaacacaaggtcgcccggtttgacctgcgccgtcgaaacaggagtacagaggttgtaaaggccctgtgcggtctggcggcccacgttccagccggagtgattcagcacccacgaaatatagccgctgcaatcaaagctggtgctgggcgaactgccgccccacacatacgggtagccgatgtacttcgtggcttcctccatcatggcggcaaacctatcatcctttagtgcttccgggggaacgtcgtagtaagttggctgcttgatggtggacgcattggggtattgcgctttgccaaacaaatccggccgattacccagcgtgcgcatatagagcgaataggcactaagctgttcttcggtcagtacttccacgggcagatgggacaaatctttgttcttcagcttgaccgtacagatgtagtattcatacggctcttggtaggtgataacctgcggcacaccatacgggccaataatgaccatcatttttgtgcggtaacgtatctgcatggttacggtctcggtcagaatgtactgcttttcaaagagcatttcaagttcgccctgcacctcggccaatgtaaaaacgccatcatggagcgcggacaaaatcgagatcagcacataggggtcatgctcgatttcatccagataaaaatgatactcgtcgtagttgtgggtggcctcgtaggtgtcgagataccgttgcagcttttgttccagcttggcgtaggctttctctgcacccagcatatccttgtccttggaaaagtaagaggatgccgtcacgccggttcctgctgtgcccgccatcacggtgcaggactgcaaccccgttatcaggagcagagccagcagaccgaacaccgccacgatcagaatggttttccagttccgggccgcaaattcggccactcgttcgccgccctcggccgccagctttgttacccggaaaccgttctctgcggtggcggctgcaccctgcgcggcggcttgtccggcctgccgtgcagctttggcatactgctgtttgatacgccgtttctgccacatccgggaaatggggttgctggccgtctgtgcaatttgcggattgtcccgcaaagacttctgatagaaatactcggcgttagccgaacgcaattcccgctctgccctttccacggccttgtagggtttcatcttgtggtgccggatgccgctgcggatggctttggcggtctgatgctccaccagttcttcacccttgtggccaccctccacacccacattttcgtgttcgacttcatggatttttccgtgagcgaacagcaacgcttccgatatcgggcggctggccgggtttggtttcaggctgggtgggcctttgtcctgctgctcaaagcgcagggtggattttgccttgccgttggcagcatcgtagactttttccttgaccgggacacgctttttgggcagagcagcgcgggccgcatccagcttgtcggctttcgcttccgccttttggatgtacggctgcaacgccgggtctgcccgttcttcttcggtcagttccagacgggcggcggaacggtgcagaccatcttcactctcggcggtttccgcagcttgtttggcttttttctttgccttgtgcttatcctttacgtcctcggtgcgttccagtattttttcggtcttgccctcggaatccgtagaataatcctgttccgcctcccggctggaaacattctctacagtgccgtcagcctgattttccaccaccagaccatcacgggtcatggtctgggtgactttggcttttgcctgcaattctttcaaagttcttcacctcccatcggacagcggcccgtttcaatgtccgcaatgtatttgagaatcgggaatacctgcggcggcgaaactgcattgcccagcgttttcatccgcttgctgcggttcggcacctcttcggtcaggcgcgggatgtcggcgggttcttcggcccaaagggaatgtccgtccatttgcgcgggaaacccatcagccactctacccagtccgggttgaggtagggcttttccagcgtggtgggggtcatccggtagaccacatgggaaagccgcgccgtccacgccttgccatccttgttcatcttgcggtaactgccattcgcagagatttggatgtccagccccttgcccacatccccggtgtcgctggcaaggggtgtgggaagcagcggagccgatgatgaatacccgtttccgttcgtgccacgcgccaacggcagcagcaggtaatacgaaaacccgaacatcgtaacctgcctgctccaagtcaatgagcgttttgtcgagccccatacggaggaagccagcaacattttctccaagcacccaacggggctgcaattcccggatgacccgcagcatttcgggccacaggtagcgttcatcgtggaagccgcgctgccgccctgcggtggagaacggctggcacgggaagccacctgaaatgagggtgacggtgcgaagtcctgttttttcaaagaaagcctcctttgttacagtggtgatgtcctgaaaacggggcacttccggccagtggcttgccagcacagcggcgggaaatgccgcccactcgcattgacagacagaggtaaaccccgctgcttccgcggcaaggtcgatgccgccgatgccggaaaacaagctgaaatgtgttaagctcatagctccaccacctcgttgagccgggtggtcatgattttatagagctgggtgtttttcgggatggggttggaaaacggcagcaccacattttcaaaaatcagcagtccttcgcccggttcggaattgtcgatgtacttttgctggtctgcagagaggttcagccgttccgaaaggattttgcggtcgccggatgcctgattcagcagcgtgatgaagtcgctgttttccagaatgttttcaatttccggggaagaaagaaggtccttcacattctgggtggcccctgtgggcacaccgccccatttgcgaaagcgtttccagatctcggcactgtacgccgcggtctgttcttctttcaggagcaagtggaactcgtctgcaaaataccatgtggcgcggccctgactgcggttctgggtaacgcggccccatatctggtcttggataatgagcatccccaatttctttaactgtttgcccagttctttgatgtcaaaggccacgagccggttgtggatgtccacattcgttttgtggttaaaaacgttcagcgagccggacacatacaggtccagtgcctgcgccacccggtccgcttccggcaagtgctggtcgagcagggcttggtggaggtcagacaaaatcggcatattctccgggctgggattcgccagataggggcggtagatggctttcacagcgcggtctatcacggtacgttcaatcgcttccaaacctgttttgccgcccatgaccagttcacagaacgacagcacaaaatccgatttcaaggccagcgggctgtcatcttcggagtagttcaggttgatgtccaaaggattcacatagtccttgctggtgggcgaaagtttaatgacctgcccatgcagccgcttgaccagcggataatactcggcctctgggtctgaaacaaaaatatcgtcagcggtcgttaaaaacacactgacgatttcagacttgcagctcatggatttgccgctgccgggcgtgcccagcttcagaccgttgggacaccgggcctgcttgcggtccagcatgatcatgttgtgggattttgcgttgatgccgtagtacatggcggccccgctctgaaaaagttcctgtgtcacaaagggcacgaacaccgccacgttggaggtggtaaggctgcgctgaatctttatctggttgatgcccagcggcaggctggacacaaggccctgttcctgctggtagtccagccggacaagggagcagttgtacttctgcgccacacccgccgcttggaacacatcgttgcccagcttttgcttggtgtcggccacattcagcactaaaaaagtcagcatgaaaagccgctcgttccgggtctgcaatttgttcagcagcttttttgcatcctcgccgtaggtggcaaggtcgctgggcaggatgtccatgtcgtacccggaacgcacagcctttttctgctcctgaatcttcatggcatcaaggtctgtgatttttcgcttgatggttttgatggcctcggtctggtcgatggcctgcacatggagattgacgagaatcccgctttccgttttgagaaagtcggccagcatttcgtctgaaagttccggcgcaaggatttgcaagaagctcaccgcgccatacttgccgcccaagccaaaggtcttggccgtgccgaagcagagggaggacggagccacaaagtctttggtggagaggccggagggggccagccagttccagtcaaagcggaacggttcgccgtccgggtggaagatgccgtgcagcacttccaaacgctcctgcccgtccatgacgtgtgccacgcagcccatggtcttgaaatagcccagcaggtcaaggccaatgcgggtcagccgtgctcgtgccgttttcaggctgtccgcctcgatggtgaaggtcaggtacttggttttcacgatgccgttgttgccgctggcaagctgcttttgcaggatggcggtatactcggcgcggatgtcgtcaaaatcgtctccctgcggtgcgatttcaaaactttttgcgtactgcaccgggtcaaccttacgattgaggaatgaaagctgcacatgaatggaggcatccacatagttgtacaggtcgcacaggtgttcaaagatggcggtgcgggtctccggctgagccagctgataactgatgtcctcaaaggcaatgcacttggagaatgtgcggcggtcaatgcggcacacaccgtccgggtagatggcctcatacgggatggtagcctgcgccgtgcggggcttgccgtcacccttgtacttgcggagaacggcatcaatttcttttttctgggcgcgggtgagttttttgggcttttctgtttcgcggggtgtcgtttttctggacaatggccttaacctcctgttccatttggtattgccgcacaagggcggcataagcgttgttggtctgatagggtctttccttgggccgcaggaaacagcactgaatcatttgctgaaccactacttcaaggggctggccgtgccgctcaaatagggcaaacagcagtcccggcagcatggcaaaaatcatcagcagggccgctgcgctgttggaaagatagtcccgggccaaaaaataaagcggcccgcccgtgaggagcgcaccgccgaagcagaccagctgccgcttggtcagcccgaataaaactttggattttacatgggtcaaatccttgggaacggtcacatacgccatacgtttctcctttctcggccttagtgggcaccaaatacggatttgctgatgctgccggtcttgaacagacaaaaacagagcagtacggtgtagcccatgcagccccagatggccccggcaatgtccgctgcgcctgaaatgttgcgtatcagcaccgcatagatgcccacgacaatcataatcaggaacgcttggaaacccagcgccagcaaagacttcaagtagttctgcccggtgctgcgccactcgctgttgcccatggtcgccagcgggataggccccagtgcggtcacaacataaatctcgatcatgcggccgtaggtcacaaggaaaatacagatagacaggatgttcatggtcaggcccaccacaagggtctggaaccacaggctgagcagactgccaatggtcatgctttccagttgaaattccagtccgggtatcaggcggtcaaagtggatggatgtttcaccgatgataacgccggaactttggttaacaacgctctgggtggcatcgaacacacccataacgatattccatgtgttgctgacaatgaggatggcaaaagcagacttgaaaatccagcggaagaacatagaagtgtcaaagtcgtgcatattgttcttttcagtaatcatctggataagcccatggcacatcacaagggcaaggatagccgctgcaatgggcaacactaccgtttcggaaagactacgcagcatattgaaaataccgctgttccatgcctgcggggtggagccaacgtccgaagctatttcgcccaccttggcattcacgttatcgaacaggccggagaggttgcccgtgatgccatctatcaaaatgccttttatccatttctcgatgatctcactaatcaagcaaagatacctcctttcccgcgccctcccatgtgagcggcagagcgcggagtaggattttaagtgttcggaaaaatgtgggcagcgatgcagggcttagcccagcagcccggacagcagcgggacaagggtcacaccgattagggcaacgccgccgcccgcgaccagctgcttgacgccctggcttttgctgccggggttatcctgtccatagccctccaacaggttgatgccgccccagacacacagggcaccgcccagaccgaccacgatggtctgcaaagtatcgactgcgctgttgaaaaattccataaggtcctcactttctgccgcttgttctgcggcactcaaaaataaaattattcggctgcattttcatccgacaggtcaatttcatacaggtcaaaactttcatcctgcgcgattacctgctgccgcttccggcgcagggtagataaaaacctgtccacatcaaaggcatttttcttgtccgcgtccgcaaggtacttgtagtgcgggtgcttggtgatgtcgaacttctccgagaagaacggcctcacgccccgcagctgcaaaatacacttgccgccgtccatgattgcgatttcgtcctctgacatcaacgcctttcctaatttttgatagttcagtccgtgggaggtttgagaaccccggttttcactggtgttgaaactgtcgatggtctctttccccagcgcatcggagatctctttggcatttttgccccgcccactcaaaaagagaacagaatcgcagttgtccgaaatgatttcggctgcatctttgtagatggctttcagctgcgactggctctgcaaaataatagatgccgagatttcccggctgcggatggtggcgatcagcttgtcgaagttgggtatctgtccgatgttggcgaactcgtccagaatcagccgcacatggacaggcagccgaccgccgtatttatcatccgcacggtcacacagcaggttgataagctggctttggagcatggccagaatgaagttgaaggtggtgtccgtgtcactcataatcaggaacagtacggtcttttcatccccgatggtgtccagctccatttcatcgttctccatcagctcccgcacctcccggatgtcaaatggggctaaacgggcaccacagcttatcaggatggaggaacgggtcttgccggccgacagcagaaactttttgtactgccggacagcgaagtggtccgggtctttctgttccagccgctcaaacatgaggtccaccgggctttggaagtccgggtcatcctcgcgggcttcactggcatttatcatttccagcagggtggtgaagttcatttcttctgccggggcctcgtaccagatgtagccaatcagagccgtgtagaacagccgttccgacttcacccaaaaatcttctgctgatttctcaccctcgcccttggtgttagcgataagggtattcaccagcttcagcacgtccttttccgagtggatgtaaacaaaggggttgtacttcatggacttggaaaagtttatcgtgttcaggattttcacccggtagcctgcccgctggaacatttggccagtttccagaaccagagtacctttcgggtctgtgaccacgaatgaggtgggatagtcggaagtgggaaagcattgcatgaggttgggcttcacatagaagcgggttttgccgctgccggagccgccgatcaccagcacattcttgttccgggctgtcttggggtctttgggccgcccggtcatggtcaggcgttcggtctgggtcagcaggatgttgttttcaaacttggggtcgatgtacggggcaatgtccttggcggtgccccatcgggcagagccgtattcttcacccttgcggtatttcttggcgttcttgcctttgctgtacacgatgagccggacagccaccgccccagcaaagccaacgcacaaatcaaacagatgcaggctgggcagcgggtttgcaaaggcggcagagatgccgcccgtcaggtggagcagctttgccgaagcatctacgcccgccgccagacggtacgcctgcccgcatttggcgaacaggtacacgaacagcagatacggcagattcagcaccagcagctttttcagttcaagcttcatcgttccagccccctttgcttaattttttctttggcgcgtttcggctgctgggcggctttctgcttggctgctgccagcaccttgcggatagagggccgctgctccttggtaagtgttttggccgtgaactcccggaacgcctgttccagattgtccgcatccttggccttgaagatcacgatgtagtggggcggctgggtggtcttgtccttgcgtaaggtgaagtccacgccgtacttcttggcacatggcttgaacgccccgacgttcgcctccgtgacttcaatgttggtcagggacgcgccgtgggctttcagctgtttcaggctttgcttaccgtgatgcagctttggccccttggcccggtgctgcaagtattttttcatcgcagcttgcagagcttgtgcggtgagcttgcccgttttcatggacagagcaatggttttctgggtgacttcttcctgcattcagcatccctccttgggaagtagtcggaaaagcagcagctagggtggaaccaccagccgccgcaggtaaagggttctcatgggtggacgctcctttcggtcagttgttgggcgggcggccccaatcaggctgcgccatatcgtacgccacaagggacgcatagtagctgttgatggtgctgggcgcgttaaaaagcatggcccgcaggtattgcttgatgttgcggactttggtggtgttatcccgcaagcagtccatgacgaactcgatgtgatggctgtccagcttcaagaatttcgccttgaccaactctgccgggtaatcgtccccggccacccggatggacttgcggttggtgcagacggtttccagcaggatgtccacgatctcgtccagctgctcccggtctatccggggattctggatgagggtgtcatactcgatgttctccaaaatcaggtcccggtagatttgataggccgcttcctttcggcttcctgtccgttccggcggcggtgccgctgcctcgtcctcgtccaaaggcaaggggttgggggaatggataggaatggaatcggtattttgtacctctttcttttgtttttctgtaattagtttatctttatttaattgcattggattttccaacgtagggttttcctgcgtgggattctccaacgttggattttccaatgtaggtgaaactgatgcagggacaggctgcggcagctcgaagatcacatagtctgcaccgcgcagccgccctttctcgtcccgttctctggaacgctggatgtaacctgcctgttccagttcccggatggcctgccgtatcgcgtcaatgctttcccggttgatacgggccagcccttgcagggtgtagtcccaatcttccggcagggagagcatttgggataaaagacctttggctttcagggacaaggcccggttccgcaggtggtggttcgacatgaccgtgtagccgctgttcttttctacccgaaaaactgccatttcacggatgcctcctttcgttgtaaacaaaaaaagcagcgttcatttgctcccggtgatgggagaagtgaacgctgcgcgtacttgataatttttaggttgtgtggtatataaaaggcaactgacttttcaatacagctgcccatcggggtgcgatacaagcaagttgctatccgatgacctcaaaaacaaattgtactacgatgattttcggaaaatgctgtatcgctactcgcaccacaagagagacagcttttgatagctgtcttttttgttttatacggcaatttctctttaacagcaacagcggataagaggacttgaacagcacggccccaccgcaggtggggcaacaaaagccccagtggggcttttgttagtgcgcggttcccaacccgtaggaatgtctaacgggaggactgccgctgatttatttcactgtatactccctcttcagctgtaacagcggataagaggacttgaacagcacggccccaccgcaggtggggcaacaaaagccccagtggggcttttgttagtgcgcggttcccaacccgtaggaatgtctaacgggaggactgccgctgatttatttcactgtatactccctcttcagctgtaacagcggataagaggacttgaacagcaacgacgacgaccgctgcctgcggcagaaacagggaggagttgcccgagcagcgttctgatttttcaaagccctgccaaggggctgcggaaaaatcagcaaacgcaacccgtaaggccccgcgcagcgccgtaagcaatcagcccagtgggctgttgcttagcccgcggttcccaacccgtaggaatgtctaacgggaggactgccgctgatttatttcactgtattgagaccaatttttatcgtgcaaaatgctttgcacgatagtcccgtgggctgatgccatatacatttttgaacgcacgggaaaagtgaagctgattgggatagctgaccatggtgctgatggtgctgatgggaaggcggctttcagtcagcagctgtgccgcccgtgccatgcggtagtgcagcaggaacccctgtgggctttcgcccatggtatctcggaacaccttgctgaaatagctgcggttcagtccgcagaaggaggagatgtcctcgatggaaatatcttcgctgtaatgctgctctatgaaggacagagcctctttcataataattcgcagtattccttcaaattgagatataacaagtcgcatttttgcatttacgaaactactggcagatagtataataatgacacaacaagagaaaagaaactgtgcaatgtgatgatgcacaaaattttctcgctgcttttgtaagagctgacaaaagcaagaaaatcgaccctgccggtgcgacacagtacgaagatcaccctacggaataaggactttggaggagaacaaaaatgaagatttctcgcagacaattcgtaaaggcaatggcagcaatgagcgccgccgacaggcgggtagccgttccgacacgaccgcctgcctgtcggcatttctcttaaggcaacaccgcacaattcccgccttacggcttaagcaccactccggcggctgcggcacggcatctgcgttgccaaaatgctcgataatacacaaagtattatctgcgcttttggcttagcatctgccgcacctcactcgccgtatcggcacttagaattatgcggtattgccttaaaaataatctcgttgaggtataggatccatgagtattcgatttgattccgagacccgcatttttgtattggagactgcccataccagctaccacatgaaggtggatgcgcttgggcacctgctgcatctgtactacggcaaaaccatcggcaccggggacctgatgcagctgtatccccgcacagaccggggattctcgccggattactacgcttaccgcacccaccggggcgtttccccggatctgctcccgcaggagtataccggctgcaatgtgggcgatttccgtctctcctgcctgacggtggccgacagccgtggcgcctttggcgcagactttacctatgtgagccacacggtggaggcgggcaaatatcagctgaccggtctgccctgtgcccacgcagaggaaaacgatgccgagaccctgatcgtccgaatgcaggacgagaccaccggtctgacgctggagctgctgtacggcgtgtttgcacagcaggatgtcatcacccgtgcggcgcggctgacaaaccacggagataccccgctacggctggacaaggcggcatctgcctgtctggatctgccctttggcagatgggatctgctgcatttccatggcagacacgctatggaacggcagctggagcgggaagctgtgggcaccaatatccagaccatttcttcggtgcggggcagctccagccaccacaataatcccttcctgatcctctgccagcaggatgcaacggagaccagcggtgcctgctacggggtgatgatggtctattccggcagctaccagatggacgtggagcgctctcagaccgggcttgtccgggtagtgagcggtattcaggaggagcgctttgcgtggaacctgaagccgggcgagacctttgacaccccggaggtgatcctctcctttgcggcagagggtctgaccccgctttcccagcagtaccaccgctttttgcggcgcaacatctgccgcggcccgtggaaggacaaacgccgcccggtgctgatcaacaactgggaggccacctattttgatttcaacaccgaaaagatcgtaaagatcgctgaaaaagcggcctctctcggcgtggagatgatggtgctggacgatggctggttcggcacccggaatgacgacaatcagggtctgggcgactggatcgtgaactgcgaaaagctgcccggcggactggacccactgatcgggcagatcaatgcactgggcatgaaattcggcctgtggatcgaaccggaaatggtcaacgagaactcccagctgtaccgcacccatccggactgggcgctgaccctacccggacgcaagcccgccatggggcgcaaccagctggtgctggatctttcccgcccggaggtggtggactatctggcaggggttatcggcaagctgctgcgggagcatcacattgagtatatcaagtgggatatgaaccgcagcatgagcgatgtgtacagccgtgctttccctgccgagcagcagggtgagatcatgcaccgctatatgctgggcgtttatgcgctggcagagcggctgacgcagggcttcccggaggtgctgttcgagggctgcgcaggcggcggcggacgctttgatgccggaatgctgtgctactatccccagatctggtgcagtgatgataccgatgccattgaacggttgacgatccagcacggcacctcctttggctacccggtctgcaccatgggcgctcatgtttctgcctgccccaaccaccagaccggccgtactacgcccatcgacacccgtgctgtggtggcgatgagcggcacctttggctacgagctggatctgggcaaattaaagcgcgccgagtgcaccgcagtgaaaaaccagatcaagcggttcaaacggctgaacgacctgatccgtaccggcgattattaccggctgaccgacccggcagaaaacgcatatttcacggcatggcagtttgccgcagaggacggcagcgaggcactgctgaatctggtggtgacccatccgcaggcaaatcccttgcccatccacctgtgcttccgtgggctggaagaagatgctgtgtatgaactggatggcatcgactatttcggctcccggtatgcccacgacgtagaggacggcattcacaaggggatgcggttcagtggcagcaccctgctgtatgcgggacttgtcctgccgcagctgtttggcgattatcccagcgtgcagcttcatcttacacgaaaaggataaagaaagatgacaaggcaagatgattttgcattccggtttgccaagcacaaggacgaactggaatggctgttcatggagctgtaccacaaccccggtgtgctggcgctggtacgcaagcgcggcgaggaaacgctggtgggactgttcaactttaccgagtacccggcgggagccagtctggacgctctgggtggcgagtatcacaccccggagggcacttctgtctgtctggcggatgtggagctggagccgtatcaggcgctgctggtgcaccgctgaaaggagcagccatggatattgtaacggttggtgaagttttgatcgacctgaccccttccgcaccgctacgctggatgctgccgcctgcgccaaaaagctgagcgctgtcattgcttatgacccgaattaccgtccaaacctctggaaaaacaaagaggatatagaaactacagacgctcgctattccgccatacagattcatcagtgacttcggcgcatctgccccggcatacctccccattacgcagggctttttgtccaactacgcaatggaaacgcccagttgcgcaggatgattgcaactctttcctgaaattgctattcttttgtcaatctccgtatacgaacggaacaacataccaaaaggagaagatttcatggcaaacaaggtttccagaagacagttcctgcacaccgcatccattggtgcgctgggggctgctatggcaggggctctggtgggctgctccggttcctccggcagttccagcactgcttctgccagcggtacttacactcccggcagttattctgccacctccaagggcatcagctcagacgttaccgtcaccatgacctttgacgctgagagcatcacggatgtgaccattgatgtttccggtgaaaccgagggctttggcaagggcattggcaatgagctgaaggagcagatcctcaaggctcagagcgccgagatcgacggtcattccggtgcgaccattacctcggatgccgttaaggatgctgttgcaaactgtgtggcacaggccaagggcgaaccggtggtcagcaccactcccggccagagcaccgcagaaggtgagagctggcgcaccgctcccgatgcgatcaccgaatttgcaaaggagtacaccgccgatgttgtcatcgtgggcggcggtcaggccggtacgccggctgcccgtgccgctattgaagccggagccagcgtgatcgtgatcgaaagccagaccgaggacgccatgagcttccgcggcggcggacagatcggccacctgaacagcgagtttttggccagcaagggcattccccagatcgacatacaggagtttgttaccgactggcagctgcgcaccaacaatcgcagccgctgcggcctgatcatggcctatgccaagaacagcggcaagtgctttgactggatgaccgacagctttactgcagaggaaaaggacagctggagtgtacgtcagtggccgctgagcagcaactacacccagaagaagagcggcatcagcacctgggtaggcacccccaccctgaacggtgatgcttcgccggtcaagcgctgcatggagatcgcccgcgagaagggcgcagactaccactttggcaccaaggcctgccagctgatcaaggacggcgatgccgttgttggcgtggtgggcaaggaggccgatggcagctacatcaagttcaccgccaagaagggcgtgatcctttgcggcggcggctttggcggcaacgctgaaatgtgccgtgacctgctgattgagatcagcgactactgctctgacgataccgctattggcggcatggatgacgatggctccggcattcagctgggctactgggctggcggccgtctggagagccgtccgctgtccagcatgggcggtaactacgtctacccctgcaacagccccggagaccctattggcaccaccgctgcactgtgggtcaactgccacggtaagcgctactgcaatgagggctttggcgatatcgtgcttgcagctatggccggtgcaaaggaaccgcagggtaagatctttacggtattcaacgataccatccgcaccgatcttacctatcaggcacccggccacatggctgttgattatgccaacggtgaggacgagaagctggatgatatcatgcagggtgccattgacggcggcgatgccggctacgaggtgaccggcatgagcactgtaaccgtgtatgccggcgaggatgcccagcagctgggtcagcgtctgggctttaccggcaccgatctggaaaattttgttgccaccgtagcacgctacaacgaactgtgtgaaaagggcgtggacgaggattttgctaaggagccggtgctgctgcgtccgctgaacggcaagcatatctttgcctacggtgctgagaaatccatgggcagtatgctggtgaccaccggcggcctgttgaccgatgataacagtcaggtgctgggcgaggactttgagccgatcaagggtctgtttgcagctggcaacaactgcggcggccgctttggcttccagtattctacctccatccccggcgagagtctgggtctggccaacacgcagggtatgatggttggtcagtacgttgctgcactgtaaaagcggcatttctgagcgtttttcttttttcttctttttcaggagagctgccccggtgtcgtttgcgcatcggggcagctttccctgtccggctgtctttgtgcgaaaggagttttgccatgtctgccccgctgcatctttatctgcacgttccgttctgcgtccggcgctgcaccttctgcaaccaaaaaatctatcccgccacgccggagacctgtaaggcctatgcaaatgcactgctggctgagctggaagctaccgcaccggatttttccggcgacccggtgcagacggtctactggggcggcggcagccctacggcgctgtcgcaggacgattttgcacggatcatgcgccggatcagggagctgttctctctggctgcggataccgaggtcaccgtggaagcattgcccaaccgtgtggatgcctcgtggatggtcgccttccagaacaccggggtcaaccggctggtgctggggctggctactgctcgcatcccggagctggaacgcattggcagcgcaaacaatatgcctagttccgagaccagcctgatccttccgcagctgttccatttgcccgggtatgaggcaacgctgctgtatgggattccggggcagacggcggaaaattttgccaccagcctgcggttcgcagtcaagtacaaggtgtctgccttgcggctggaccccttgaccctgccgaagggcgtggaagaaaccgtgtgcagggacgaggttccggcgatgctggactatgctgcccgccatctgaccgagaagggctaccatgagtatctgcccggacgctgggcaaaacccgggcaggaatgccgggacctgctggcgcgccaaagcacggaaaactacctgagttttggcccgggcactaccacccgggtagacggaggtctgtcccgcaccacagagaatattgccgtgtacaccctgcacccgcaggagccggaactgctgtataagccggtgaccggggcataaaaggcaccagaggccgctgcacaaatgcgcagcgacctctggttttattttttctccgggaacagcagggtgagtacgaactctccgttctcgctccgcagactcatctgtccgccgtatttttcggtggccgagcggatactggtaaggccgaagccgtgattctccgggtcgtccttggtggttttgggcagggcatctaccggcagatgctgctgcaggcaggcgttgcggaaattgagcaccacaaacccgccccgcttctggcatcgcacactcagggcgcggctgtccggatccggcagcgcagagcaggcttcgatggcgttgtccatggcgttgccaaaaatgacgcaaaggtcgatgggctgtataaaattcagcagcttgccgtccactgtaatggtgcaggcgatctgtgcctgttggcatcgtgccagcttttcacccagcaggatgtccacagtctcgttgccggtggcggtcatctgctcatagggctgcacctcctgcaagatctgccggatgtgcgcctgcacggttgcctgatcgctgctctgctccagatagagcagaatatttttcaggtcgtggtacttgcatcgtaccgagtccaccgctgttttgcgcagcaggtattgctgctgttgctgctctgcggcgatgcgcagctgcagcatggtgcgcttttcctcctcagcgatggcatagctcagaaagctgatgtttaccagcagcgccagcacacagcacccggtcagaagcaccggcacggcggtggtcagttcttcattggtcaacggcagccaataggtgagccgacagacaaacagatagggaacagcggccagaacatacaaggcaagtgcagcgctgcgaaggatgcgcagcttttcagccgggcagaaactgcgcagcagccacagcagcgttccctgcacggttgtcagtggcagatacgccagcagcgccgcccagaatgtgccggagcgtagagggtcgtatcccagcagccgcatattagcaaaccgcatgatggtgtcggtgcagtcggtgagcagaaaaaagcacagtgcttgctgtacagccagcccgatgctacggcgcagcagggcataggcagtaatggcataaagggcgatggagcagacgatgccgacatactgtccaccgagggtggcaaaggtctgctcccactgcaatatcaccgtcagtgccagcaccagcactaccggctgcaagtcctgacgttgcagactgcatcgcagctcggtgccgcagacgtaaaaggggagcagcagtccatagctgactgcccgcaaaaaagtacacaggctgatggtcatcacagtgcctccccccaacaggatgccagcgcggcaagcagcatcttgcggcggtatttgcttaccggcaatcgctcactgcccagcacaacatcagcaccgtccagccgggtcacctgctccagattgatcagaaaggagctgtggcaacggaaaaatccgtttcctaaatccttttccagtgcggcaagggtgccgctgtagctcaccacacccgctgtggtatgcagtaccagccggtggctgaacacctccacatagacaaggtcctttgcacgcagacggaataccccatcgttgtttttaatggtcaggatgtgctctgcctgttggcagatccggcggcaggcacgctcaaggctgcggcaaaaccgcggatagctgaccggtttgaccagataatccagtgcagcgacctcgtagctttccagcgcatagccggtaaggctggtgatgaacacaatctccaactccggcagcgttccccgcaggcggtgggcagtctccatgccggaaagccctggcatctggatgtccagcaatgccagctgcaacccttggggaatgttttccagcagctgagagccgctttcaaaaaacaccgcctgcaccggctggccgttttctgcttgccagcggtcaagatattcctttaatgcagtctgcgcgctggtctcatcctctgcgattgcaatcttcagcattgatcttcaccgtcacccatatccatagcgttttttctattttaccatatttatgcttgcaggaaaagcgctaaaagcatccttctaaaagcatccttatagaatagaaaaccgaaccctaagaaagcaggtagagtaaaccgaaaatagggtgcgcatcaagagatgcactctgccgtagacaagctctggctcgttccaaccgctgtgtgtccgaaaccttatagtcatcctctttgctataattgttgctatgatcgtactggctgatttactccatcttgtttattaaaaacaaaaaacagggtgcgccctgcccttgcctttctcttttttatgccgtttatcgtgaatgaaattcatttgacaaaacaatttttgtaacttatactggatgacatcacgaaaaaataaaggaagtatctgtcatgctgactctggataagatctaccacgccgcctttgtgctgaaggacgttgcccgcaagaccgacctcattgaagcccccaagctgtccaaggactgccagctgtacctcaagactgagaacctgcaggccaccggcagctttaaggtgcggggcgcttactataaaatcagccagctttccgaggaggagagcgccaagggcgtcattgcctgctctgcgggcaaccatgcgcagggcgtggcgctggcggctacccggcgcggcatccgcagcatcgtctgtatgccggacggcgcacccctgatgaaggtggaaaacaccaaaaatctgggcgcagaggtctgccttgtgcccggcacctacgacgaagcccacgacaaggctgtgcagctgcaaaaggagtacgacatgacctttatccacccctacgatgacgagcaggtcatcgccgggcagggcaccatcggtctggaaattctcgaccagctgccggatgtggacgctgtagtggtgccggtgggcggcggtggattgatctccggcattgcctttgccatcaagaccctgcggccggaggtcaaggtgtacggcgtacaggccgagggtgcccccagtatgtaccgcagcctgcacgagcacaagtaccagaccctgaaagctgcctccacctttgcggacggcattcaggtcaagaccccaggcgagttgacctaccagctatgcgagcagtatgtggacgatatcgttaccgtgaccgaggacgagacggcagcggctatcctctccctgatggagaaccagaagctggtggccgagggtgcaggcgctgtgccggtggcggcggtgctgttccacaagctgccggtggagggcaaaaaggtggcctgcgtcatctccggcggcaacattgatgtgaatatcctgaaccgcgttatcacccgtggtcttgtcatgagcggccgcaaggcaaacctgaccatcgcactggaggacaaacccggccagttgaaaaaggtggccgaggtggtgtcccgctgcggcagcaacgtggtgtcggtgcagcatgacggctccgaccccaatatgcccatttccagctgcttcctcaagctgacgctggagacccgcgatgccgcccagatcgagcagatccgcaccgagctgaccaaggccggcttccagctggtcagcgaaagagtataacaaagataattggacgatttggaatagccgacgcgttcgctctggctatattcagcggaaattttatttttatatttgcaatccagaaaagcctgcgggcttttctggattgccttttcacgagaaaggccatggttgaaatggcatcgattgagatgccgcttcatgtgccgaccccttcggtgaaaaatgcgtttgtcgtgccccgcagggcacgacaaacgcaaaataaaaaagaatgattccgctatttatggccagagcgaagcggaggccattctaaattgtgattttataacaaaggagaactgctactatgaaagtcgtatctactaccaacgcacctgccgccatcggcccttacagtcaggcactggatctgggcaatatggtgtttgtgtccgggcagatcccggtagaccccgccaccggcactatggctgataccgtggagcagcaggccgcacagagccttgcaaacctgaaagcgattctggccgaggcggggctttccatgaacaacgtggtcaagacggtgatctttctggccgacatcaacgattttgccgcagtgaacgcagagtatgccaaggcctttgccgagccgttccccgcccgcagctgcgtgcaggtggcagccatccccaagggcgcaaagctggagatcgagtgcatcgccgtgcgggactgagcgaaaaaataagataagaaaacgggacatcggagcatctgcggatgctttggtgtcccgttttttggcattacgttcggaaaaccggtttttacttctgcacaccggcttcgcattgctcgatgaactgcttggccacccgggggctgcggccaccggcacgcagggcaaaggcctcggccttgagcagcagctgctcggtgggcatttggatgttgtgctgcttggcaagctcttccagaatggtctcgaaccgtgccttttccggccgctggaaggtgaccgtcagaccaaaccgggcggaaaggctcatcagctcctgccgggtgtcggcttcgtggatgtcgtcgccggtgcggtccgagagggtctctttgatgaggtggcggcggttggaggtggcgtacaccgcaatgttctgggcgcgtccgcctacactgccctccaagatggctttcagggcggcaaagttgtcgtcgttggcggtaaagctcaggtcatcaatgaacaggatgaacttgagcgggtttgccgccagcttgtccatcaggtcggggatctggtacagctggttcttttttacctctaccagccgcagtccctcgggcgcaaactcgttggcaatggcctttaccgcgctggatttgccagtgccggcatcgccgtacagcagcacgttgttggcgggcatcccggccagcagcgcctttgtgttggcaatcaccttttcccgctccttctcgtagccgggcagttcagaaaggcgctgcgggtcggggtactttaccggcacaagctggccgttctccaccgtgaatacatggtgctttgcaaacataccgtagccctttttgcccacctcgctcatgcgctgggcgtaggcggcggcaaggtcgagctcacaggtctgccaccggggcagaaaagccagttccggccgctgcgcctgctccgagtaggcggtctggaacagctcgtccagcgtcagcccgcacagctgctgcaaaaactgcagctcgctgtccagggcgctttgcagcagcgcgtccagctgcccggcagcggcctgccgcacgcagatggtctcggcctccagcacagcattgctcaggtagctgccccagttggtggtgtactcgaacagcgcagcctcaaaggcggctacggcatcgcacaccgggccgtaggaggagcagcccgtctccatgcggtcggtcaggtctaaaagtcttgccacaacagggtcgttcagcagggcgcggaacacaacaagcccatgcaggtgggcattccattctcttaatttcataggcagatcccttttcctctccattggcacataccctacaaaacgcaggtacgcggatatcaaaagtatacagcggttcgggcggggatgcaaggggtgttaaaaatgcttcatctttgggctgattcaggttacaaattgtcgattgacaaaagcccggtttatagtataatttacatcaacaaatgcgcagatgggaaaaagtaccacacgatccccactgttcagagagctgccgtctggtgcaaggcagtcagcgtttcgtgcggaaaatcatcccggagcagcctgcccaacgggtgtaaaacccctgtaagcagcgccggttgcagccgttaccgtgcagggctttgttggaagcccgtgagagggtgtgcacagcacgccaacgagagtggtaccgcagagagcttgatgttacaaggtctttgtctcttgaaaggaacaggggacaaggactttttctttttcaaaagctctccctgagggaatggataagaagtggaacaggaataggagcgacaccatgcagttgaatggttctcagatctttgtagaggtcctgtgcgagcagggagtggataccctttttggctaccccggcggcgctgtgctgaacctttacgatgaactgtataagaatgccgaccgcatcacccatgtgcttaccgcccacgagcagggcgcagcccatgcagcggacggctacgcccgcgccaccggccgcaccggcgtggtgctggccaccagcggcccgggtgccaccaatctggtcaccggcattgccaccgcctatatggactcggtgcccatggtggcctttaccggcaacgtgcctaccagcagcatcggcaaggacggctttcaggaagcgtacattgagggcatcacggtgcccatcacaaagcataacttcacggtgcgccgggtagaggacttggccgacaccatgcgggcagctttccgcattgcacagagcggccgcaagggcccggtgctggtggatatccccaaggacgtgaccgcagcggtgtgcgagttcacccccaagcagccggagcccatccgcaccgtgactacctataatgaggagcaggtgcactgggcggcagacctcatcaacgccgcacagcgtccgctggtgtactttggcggcggcgtgcgcagcgcagccagctgccagccgttgcgggatctgctgcacaaggcggagatccccgccacctacaccctgatggccgcaggcgttgtgccctacggcgacccgatgaatctgggaatgctggggatgcacggctgctacacctccaaccgggcggtagcggagtgtgatgtgctcatcgcggtgggcacccgcttttccgaccgcgtggcgctgaaccccaagacctttgccaagaacgccaccatcatccagatcgacattgacgccagcgagctgggcaagaacgtggatgtggatctttccatcgtgggcgatgcagcctatgtgctgaacgccatgctgccccagatcaagcccgccaagcacccggactggatgacgatgatccagagctggcaggcacaggattaccatcccgtgtccgaccccacccggctgatgccccatcaggtcatcggcgaggtgtgcaaccagtgcggccccgacgccgtgtatgttaccgatgtgggtcagcaccagatgtgggcggcgcagtacctgcgccacaccaagagccgcggctttatcaccagcggcggccttggcaccatgggctttggctacggtgccgccattggtgcccagatggcactgggacgccagcagcgtgtggtgatgtttaccggtgacgcctccttccacatgaacctgaacgaagcctgcaccgccgtcagctacgagctgcctatcatcacggtcatcttcaacaactcggtgctgggcatggtacgccagtggcagaccagcttttacggcaagcgttacagccagaccgacccccaccgcaagaccgattttgtcaagctggcagacggctttggcctgaagggctaccgctgcaccaatctgccggagtttcaggaagcctttgcagatgccttgcagcagaaaggccccacctggatcgagtgcatcatcgacaaagacgaaaaggtgctgcctatgatccccggcggcggcgatatcaacgacatcatcatggaataaggaggacacagcatcatggaatctgatcagcgcagggtcatcagcctgctggtggacaaccagagcggcgttctggcccgggtgtccagcctgttctgccgccgcggcttcaatatcgacagccttacggtgtccgccaccaacgacccggcagtcagccgcatcacagtgaccattaccagcgatgaaaaggccttgcagcagctggtattgcagaccgagcggctggaagtcacccggcaggtgttcgtgctggacagcgaaaaagcgctggagcgggagctgctgctgctcaaggtggaatcggacgtgcacaaccgcacagagctgcgggagatcgcttgcatctacaaggcaaagatcattgatctttccccggacagtatggtgtttgaactcatcggccggccggacaagctggacgcatttttgaaaatgttcgagggctacaacatccttgagcagtgccgcaccggcgttactgcactggagcgcggcgggatgcaccagcatatccagaagccgccgcaggaggtgcgctccgtccagctgcccccgccgggcgcaagacgggcataaatcacattgcttttccgctcagggtgagcgaaagatagaacagagcatacaagaccggaagataaaccaaccagaaaaagtaaaaggagaataacgattatggctatcaagaaatactacgattccgactgcaacctcggcgtgctggacggcaagaccgtcgctgtcatcggcttcggcagccagggccatgcacactctgagaatctggccgagagcggcgtcaacgttgtggtgggtctgcgcaagggctctgctcactgggcaaaggcttctgagttcgctgccacccacgaaaacttcaaggtgatggaagtggaagaggctgccaaggccggtgacgttgtcatgatgctggtgcccgacgagctgtgcgccgatatctacaacacccaggtcgctccctacatgaccgagggcaaggcactggcctttgcacacggcttcaacatccacttcaagaccatcaccgctcccaagaacgtggacgtcatcatgatcgcccccaagggccccggccacatcgtgcgccgcctgtacaccgagggcgagggctgcccctctctgatctgcgtggagcaggactacaccggcaaggccaaggacatcgctctggcttatgcttccggcatcggcgcaggccgtgcaggcatcctgcagaccaccttcaaggaggagaccgagaccgatctgttcggcgagcaggccgtgctgtgcggcggcgtttccgagctgatccacgccggcttcgacacgctggtggaggccggttacgagcccgagatggcctactttgagacctgccacgagatgaagctgatcgttgacctgatcaacgagggcggcttctccaagatgcgctactccatctccaacaccgctgagtacggcgactaccgcactggcaagcgtctgatcaccgaggagacccgcaaggagatgaagaaggtgctgaccgagatccaggacggcacctttgcttccgagttcctgaccgagatgagccccaagggcggccgcaaggtgcacttccttgccaagcgccgtatggaggctgagctgcccatcgagaaggtgggtgctgagctgcgcagcatgatgagctggctgaagaagtaagaggagaaccctctcaggccgcctttcggcggcagctcccccgaaagggggagcttttgttgaaaagggagccttatagcttctccgcgaaaacctctccccctcgggagaggtggcacggcgcagccgtgacggagagggttttatcagaaaagaggatttgcaatgagaagtgacaacgtgaccaaaggctcggagcgcgcgcccaaccgcagcctgttttatgcgctgggctataccccggaggagctggagcgcccgctcatcggcgtagtgagcgcccacagcgagatcgtgcccgggcacatgaatctggacaagatcgccgatgccgtcaaggccggtgtgcagatggccggtggtacccccatcctgatccccgccatcggcgtatgcgacggcatcgccatgggtcatgtgggcatgaagtactctctggcctcccgcgagctgatctgcgacagcgtggagaccatgctgatggcacaccagctggacggccttgtgctggtgcccaactgcgataagatcgtgcccggcatggtaatggcagcggtgcgcatggatgtgcccgctgtggtctgctccggcggccctatgctggccggtacttacggcggcgaggaagtgagcctttccaaaatgttcgaggccgtgggtgcctataaggccggtatgatcaccgacgagcagctggaggactgcacctgcaactgctgccccagctgcggcagctgctccggtatgtacactgccaacagcatgaactgcctgtgcgaggccatcggcatcgccctgcccggcaacggcaccatcccggctgtgtactccaagcgcctgcagctggcaaagcacgccggtatggctgtgatggagatggtgcgcaagggcatcaccgcgcgccagatcatcaacgagcgctccatccgcaacgcgctgacctgtgatatggcgctgggctgctccaccaacacggtgctgcacctgctggctatcgcctacgaggccggtgtgcccatcgacctgaagctgttcaacgagatcagcgccaagacccccaacctgtgccatctggcaccggcaggccccacccatatgccggatctgtacgcagcgggcggcatcccggcggtgcaggcagagctggcaaagaagggcttgctggacttggatgtgcccaccgtcaccggcaagacccttggcgagaacatcaagggtgcccatatcctgaacgaaaaggccattcgtcccatcgagaacccctactcccagaccggcggtctgcagatcctgtggggcaacattgccccggacggctgcgttgtcaagcgcagcgccgtcgccccggagatgcagcagcattccggcccggcgcgggtgttcaacagcgaggaggaagccattgctgctatctacgcaggcaagatcgtcccgggcgatgtggtggtcatccgctacgaaggccccaagggcggcccgggtatgcgggagatgctcaaccccacctctgcgctggcaggcatgaagctggataagacggtagcgctcatcacggacggccgcttctccggtgcatcccgcggcgctgccatcggccacgtcagcccggaagcagcttccggcggccctatcggcctgatcgaggaaggggataccattaccatcgacatccccaatgcttccatcacactggaggtcagcgatgcagtgctggctgagcgcaaggcaaagtacgttgcgcccgagcccaacatcaagactggctggctgagccgctatgcccgcatggtcaccagtgcaaatctgggtgcggtgctgaaataagctgaagaaaacacaaacaacaaggccgctgcacggtatggcactgtgcagcggccttgttttgctgtgcgctcccggaagcgcacagcaaaaacgccgtctccgggcgggagacggcggggaagaagctttatgctgtttttacttggtgccgtagatacggtcgccggcatcgcccagaccgggtacgatgtagccgttctcgttcaggcggtcgtcctgtgcgcccagatagatgtccacatcggggtgtgcttcgtgcagagctttgatgccctccggtgcacccagcagaccgatgaacttgatgcgctttgcgccgtgcttcttgatctgggtgatggcgtcgatggcgctgccgccggtagccagcatgggatccagcaccagaacgtcacgctcggcgatatcctgcggcagcttgcagaagtactccacgggctgcagggtcttttcgtcgcggtacagaccgatgaagccaaccttagcagcgggcagcagggtcagcataccgtccagcatacccatgccggcacgcaggatgggcaccagagccagcttgcggcctgccagcaccttggtctttgccatggtgataggagtctcgatctccacctcttccagcggcagatcgcgggtagcttcgtagcacagcagggtcgcgacctcgccaacgaggtcacggaactccttagtgccggtctgtttgttgcgcagcaggctgatcttgtgctgcagcagcggatgttcaacgatcatcggggtcataaaaacacgctccttaatttatatagaacattctatcgggtacttgtctgtagccttgcccgcccggtgggcgcacaaaagctcgatttccacttcagggaaaatcagcggttttccagtgcggtcagcttgtcgatgcggcgctgatggcggccgccctcaaactgggtgttcaggaaaatgtccaccagctggcaggcaagtcctgcgcccaccacgcggccgcccatgcacagggcgttggcgtcgttgtggcggcgggtatactcacagctgaagctgtcggaacagcagcaggcgcggatgcccttgatcttgttggctgccatgctgatgcccacaccggtgccgcagaacagcagtgccttttcgcactggccgctcaccactgcgtcacaggcgggcacagccatatcggggtagtccacgctgtcggtgctgtgggtgccaaagtcgatatactccagaccaagctcctccagatgtgccttgacagcctctttcagttcaaatccgccgtgatcggcggcaagtgcgatgggttttgccatggaaaaacgtcctttccctgtgagtggtcacagctccgtttttattgtttgtttgctgcggcttcggcagccaaacgctccgcccgctcccgctccgcctgactcaggcggtggtagtccggcagcagcgcttccggcagcacagcctgcccggctgctgccatctgctttgccacaagtgccacggcagcggcacggccgccccgcagcgccgggggtgtttgcagcacacccggcacattgctgtatttattatagcacagacccgcgccatcaccaacaaaaaacaggggctttttgcaattttctacaaaatcagccagatctgtcaccgcccgggcgtcatcgtccagcaggcgggcgtggatggcaaggtcgaaagccgcactgtatacctgtgcgcggcgggcgtccagtgcgcagagcaccgtaccctcgccggtgtgggcggcggccagcgcttccaaggtagacaccggggcgcacagggtctcgcgcgggaaggccagccccttgacggcagccagcccgatgcgcaggccggtaaagctgccagggcctgcgttgacggcgtacaagtcgatgtccgcgcaggtcagcccgcacatctttaaacaggtgtcgatcatgggcatcagcgtttcgctgtgggtcatgccgccgtccagatacacctcgtacagcaggcggtcgtcctgcagcagcgccacaccggcggtcttgcccgccgtatccacggccagaatattcataccgtcaccccctcaatggtgatcttgcgggtggtatcgtccagacgttcgatgttcacccggatggggttttccagcgccagcagatcggcaaagttttcgctccactctgccgccaccacagcgccctgatccagataatcgtagaagcctgccgcacacagatcgttctcggtggagatgcggtacaggtcaaagtgcgccagcgggcgcggaccccggtagtagttcacgatggcaaaggttgggctggacactgggtcggtgcagcccagaccctcagcaagaccctcggtaaaggcggtcttgcccgcgcccagaccgccggtaaaggcgatcagtgccccgggggccagcacagcggccatccgcttgcccagcgccaccgtctcggcgcgggaatgggtgatatattctgacatgaaggttacctcatcgtttcaaaaaagggatggcagacgctctgccatccctaagtataatataaaacgtacaaaagtgcaatggtcaggcggcggcaggggtctgctgctctgcagcactgttcgttgccgtgccgggcgcggtgagccgggcggtgccgtcgccctgaatgatgggataggacgccgccgggtggggacgccgcccggtgttctggttgaggtaccatacgatgtcgttttcgccgtagacctcaaggccgtaatcaatggcctgctgcaaagtctcaccctcgatcaggcagttcacggtcgcccacagcatactgcgggagtacacgctgtacacgttgttcacaaagcccgccacagctgctgccccgccggagagcagcccgtccgaaagggcggtgtccacatggccgctgcggccgtagaactcgcaggtctccgagagtacgatggtgccgttcagcttgccgccccggtaggcattgcggaaaaagtctccggtgacggcgtagcagccgttcaccttgatgacccggtggctgagcagatccatgccgtagcgcaggtcgttccagaaatccgatttttccagcagcaggaggatgggcgcggtggcctgctttttccacagccagccgtactcataggtatagtacgcgccgtgggcactgaggatggcaaggtcgtagtctgccatccgcttcaggtcggagacggtcaccatcatgtccagatgggtgtccagcccgaaaccgttccagtactccttcatataagaatagtaggggtagcggttgctgttgaccccgttatcaaaggcatagtagatgaccgcattgcccacggtgccgttctcggcggcgagcagggcgggcgcatcctccagctccggcccgggcagggcggcgtccgcctcgctctcggtgtcggtgagcagaatgccgcccagcgcgccgcagcggtaagcaaagcttaccatgccgttttccgcatccacatagatactgtccttttccacaagcccctgcgccgccagcacgtccagctgcgccagcgcagcagcctgacgctcttcctccgacattccggcgtaagcggcactgtcggtcagggcggtgacggcggcatccgtctgctgcatctcctgcacctcggagacggtcagggtctgaggggtgccggtggtgtcctctggtgcggcggctactgccgggcacactgccgtgaaggccagcgcaatggcacacactgcactgagcaggcggcgataaaatgtatgctccatttcttcttttccgttcctctcccccggcacgctgccggggctgttgtacgcaaggcggcgtctacaggttcattgtagaatgcagccggggctttgtcaagcttcccggcaatgttttaccattccgtcacacccggcgcattgcattggcgcagggatttgtgtataatagcgatatgctgggtttttatcgcctgtacgcaggcacgccccggcagactgttctgacgaaaggcggtgctttccttggatagcattcgacaatattttaagcgcaccgataagatgtatctgctgctgtgcattttcagcagcgtgatggcggtgctggcgctgtcctcgtgggcagccaagcagggcagcggctttgctactgacgaggtgaccggagctatcatcggcattggcgactaccgccgcgcaatggtgcaggcgggcgctgccgccattggcatcgtgatcgcgctgctgctctcctgcgtggactaccgcagccttgtaaaggtgtggccggtgcacgttgtgctgacgtggggtctggtgctgcccacgctggtcatccgcaacgtatccatcggcccgctgaccatcggctacaacgccggtgataccgacaactactcctggtacaaactgggcggctttacctttcagcccacagagctggcaaagatcagctttatcctgacctttgccatgcacctgaacaatgtgcgcagccgcatcaacgagccaaaggagctggcaaagctgttgctgcacctgctggtgcccattgccatcattcatgtgcagggcgatgacggcacggccatcatctacggcatcatcggctgctgcatgatgtttgcggcggggctgagctggaagtatatctttgcggcctttgcggcggcgggcgctgccgtagcggtggcctttgcctttttcagtgataagatcggcaaggggtatcagtggtaccgcattctggcggtgctggacccggaaaacaccaccggctgggcacccagcgagacggtgtggaagaacatcatctaccagcagcagcgcggcgagatcgcgctgggctccggcggcatctttggcaacggcttattcagcggccggtattacagcgtgcccaacgcccacaacgacttcatcctcagctggatcggcaacgtggcgggctttgtgggctgctgcgtggtgctgggcgttctgctggcactggtgatcaagacctttgccaccggtgcccgcagcgaggatctgctgggcagctacatctgcgccggtatcggcggtgctctgatggcgcagatcgcggtgaacgtaggcatgaacctgcgggtgctgccagtcatcggcgtcaccctgcctttctactctgccggcggcagttcagtgcttatgctgtatatctgtgttggcttagtactgtctgtatactctcacaacacaaaaagcctgttcggataacagaataaagagcttattcagagggcgctgcaccgtgctgggtgcagcgccctcttttgccgttacacccttccgtgaaaatactaatgccggagtgtccgcagacgctccggcattgctctttatattcttacatctcgctgctgtgcagaaaacgcaccagcatgggcagctcgtacagcagcatcagcagccagcccacggcgtagctgaagggcagggcttcaatatccatcttcatcaccagcacaaacagcgcagcggcggcgacgcggccgcccatgttcagcatactgctgttcagggtgaccttcaaatcgcccatgccgcggaaaaagccttgtattccgttggtggcggcgggcagcatatagaacagggcgctggtgcgcaagaaccgcacgcccaagtccaccacagccgggtcggtggcaaacagccggatgatgggctgggcaaacagcaggcagacggcggtaagcaggatgccgtaggcaaactcaatgcgcataccgcagtggtagccctgccgtacccggtcggtcttgcccgcgccacgattctgcgccatcagggtggtcatggcgtggccgatgttctgctgcggggtataggcgaagtcgtcgatgcgggaggcggcggtaaaagctgccatggcgttgacgcccatggtgttcacgatggcctgcaccgcaattttgcccagctgcaccgtggcctgctgcatggcgctggcccagccgtagcttacggtcttgcgcagcagcttgccgtcatacaccagccaccgtctgcccaactgcaggaccggcactttgtaacggatgtacaccacgcacagcagacagcaggcggcttcactgagcacggtggaaagggcgcagccctcgctgccccagcccagtgcttccacaaaaaacaggtcgccgccaatgttcagcacggcgctgatcatcaaaaaatacagcgcgctcttgctgtcgcccagcgcacgcatagtggcagcaagaaaattatagaagaaggtgaagatcagccccgcaaacacgatgcgcaggtagttcaccgcaatgggcagaatggcggtgggtacttgcagcagccgcagcagcgggtctgccagcaacacgcacaaggcagaaaaggtcaaagagaacaccgtgcccgcaatggcggtggtggagacctgacgctccaccagcttggtatctcccgcgccaaaggcggtgctgaccagaatgcccgcgcccagacacattccgttgatgaacaggatggcaagggtcatcagggggttggaggtgcccacggcagccagtgcgtcctcgcccacaaacttgcccacgatgatgctgtcggcggcgttgtaggtaagctggaacaggttgcccagcaccagtggaatggtaaatttgatcagcagcggcgtaatagcaccgctggtcatgtccttggtcatgaaaaacgtccttctttcctattgatggaagcagccgcttacacgatgctggcgcgtccgctgaagatcgccagcgcagcgcggctgttgcagttggccagcagctgggctgcggcgtgcagggcagcaccggcgctgaccgaagcggggatggcatcggtgcgcagcacctgctgggcggcacgctgggcgtcccggcttgccacggcggaaacattatccaccacatagctgttgtagttttccggcacgatgccgtagccgatatccgggatgccgtgcgggccggtaagcccgccgcccagcacctgattttcgtacggctctaccgccacgatgcgcacatcgttcgtccatgccttgatggtctcgcccacgccggtcaccgtaccggcgctgcccaccccgatggtaatggcgtccacaaggctctggttctgccgggcaatgctttgcacgatggcagggccggtgacccggcggtggtactccgggttgtcatcgttggccagccagttcatatagtaccagccgtttgcggcggcggtctgcgccgccagcgcccgcgccccggccagaccgctgcgggcggggctgtgccggatctgtgcacccagccgcagcaggtactcctgccgcagggcaggggcgtcctccggcatcaccagcacgatggggtgcccggcggtcaggctggccagcgtcagggcggtggcaaaggggccggagaccgcttcaatgatgggctgccccggggcaagctgctttttttcaatggcaagcgccagcatcccctcggcaaggccgtcccgggcggtgccggtggggccgtaaaaatccagatatgcgtacagatgccccttcagcccgcaggcggcggcgtagccccgcagctccacaatgggacaggcggtggtaagggtctggtaaaaattagagtagatcggcacaagggcactcctttctcttgggatacaacactattatcctaacgcaaagcccccggctgcgtcaagatgccttttggcaaaaacagcgaatttcaggcagatatttcagaaaaaactccaaaatccccttgacaaggggcaggggttctggtatactccatccgtaaagcaaaaaaactttacaacacagcaagtacagacagcagagcaccgggggtcaacagcaatggcaaaagatctggaaatggggtatctgctggatttttacggcgaggtgcttacccagaagcagcgcgagatgctgcgccagtattacaacgatgatctttcgctgagcgagatcggcgagaacttcggcatcacccggcagggcgcacgggacgccatcaagcatggcgagactaccctgaaggaactggaagaaaaggtaggctttgcagcccgctaccggcgggtgcagcagaagctggaacagctggagcagctggtcatcgacacccggttcgagtgcaccggcccccgcgccaatatcaccaccacggaatatgtggaaacgctgacaaaaatgctggagctcatccgctcgatggatgaagcaaacgaaagctgatcgaattttgaaaggagcaccgcacaatggcatttgaatccctgaccgaccgccttgccggtgtattcaaaaagctgcgcggtcacggtaagctgaccgaggcagatatcaaagccgccatgcgcgaggtgcggatggctttgctggaagccgatgtcaactacaaggttgcaaaggacttctgcgcaaaggtgtccgagcgcgccatgggacaggaggtcatggagagcctgacccccgcccagcaggtggtcaagatcgtcaatgaggagctggtagccctcatgggcggcagcgaagccgcccgcctgaacatcaagaacaagggccagacggtcatcatgctctgcggcttgcagggcaacggtaaaaccacccacgcggcaaagcttgccaagttttacatcaagcagggtcgccgccccatgctggtggcctgcgatatctaccgccctgcggctattgaccagctgcaggtggtgggcaaacaggccggtgcgccggtgttcaccctgcccggtgcaaagccgccggagatcgcccgcaaggcgctggcgcacgccaaggactacggcaacgacatcgtcattctggatacggcaggccgcttgcagatcgacgaagtgctgatgcaggagctggtggacatcaaggccgctgttcccgtggacgagacgctgctggtggtggatgccatggccggtcaggatgccgtcaatgtggctaagaccttcaacgagacggtgggcgtggatggcatcatcctgaccaagaccgacggcgatacccgcggcggtgcagcgctttccgtgctggccgttaccggcaagcccatcaagtttcagggcaccggcgaaaagctggatgatctggatgtgttccacccggaccgcatggcaagccgcatccttggcatgggcgatgtgctcagcctgatcgagcgcgcacaggatgccgccgacgaaaaggccgccgaggagaccgccaagcggctgatggaaaacaagttcgatatgaacgatatgctggagcagttcgcccagatccgtaagatgggcggcgcaggcgcaatgctgagtatgctgcccggcgcatccggcattgatgccagccagatcgatgataaagcctttgaccgcatcgaggccatgatctattccatgaccaaagaagagcgggaaaagccctccatcatcaaccccaagcgcaagcgccgcattgccgcaggcagcggtacccgcgtagaggacgtgaacaagctgctcaagcagtacgagatgatgcagaagatgatgaagcagttcaagaagagccccaagggctttgcccgccgtctgggcggcatgatgggcaaccccaacgccttccgcggactgaaataacaacggtatacaaccccggcggggtttgtaacatatatcaaaaacaacaatttttggaggatatctattatggcagttaagattcgtctgcgccgcgttggcgccaagaaggctcccttctaccgtgttgtcgttgctgacagccgcttcccccgcgatggccgcttcattgaggagatcggcacttacgatcccaacaaggagccctctgaggtgaagatcgatgccgagaaggcaaagcagtggatcgctaacggcgctcagcccactgataccgttcgtgtcctgctgaagaagtccaacattctgtaagtagggagggctgactcatgcaggagctgttgctggcagttgcccgcggtctcgtggaggacaaggacgccgttaaggtcacggtggacgagccccgcgaggacggtaccatcgtctaccacctgagcgtggcagagggagatatgggccgtgtcatcggcaagcagggccggatcgcaaaagccattcgtgtggtgatgcgcgcggctgctgtgcgggtcgatgaaaaggtccttgttgagatcgactgagcaccctacgggccctttgcctttgcggcaaggggcctttttgtttagagttaagcggaagcaccctcatccggcgcgaacgcgccaccttcccccgactgggggaaggctttcccggctggtgcactctcataaggcttcccccggcagggggaagctgtcgaacgcagtgagactgatgagggcgtattggcgcaagtttgataacacaggagcgaatttatgcagcaatatctggaagccggaaaagttgttaccacccacggtgtgcgcggggaaatgaagctggagctttggtgcgacggggtggattttttgaaaaaaacagggcgcctgtacccttcggcgcagggcggcaaggcatataagatcctttccatccgtccgcaggggcagatggcgctgctccaactggagggggtcagcgatatggacgccgcccgggcgctgcgcgggcaggtgttctactttgaccgcaacgatgccaccctgcccgcaggccggtggtatgtggcagacctcatcgggtgcgaggtgcgggacgccgacaccggcaaggtgtacggcgtggtgaccagcgtggaccacccgggtgcgcaggatatctacaccgtcaaggcacccggcggcaaggagtatatgttccccggggtggatgcttttttgaaagagcgcaacccgccggaggggtatatccttgttacccccatccccggtctgctggatgacgattttgacagcgagcgggaggaggagtaagccatgggaatgcgtgtggacatcgtgactttgttcccggagatgtgccagcaggtgctggacgccagcatcatcggccgggcggcaaagcggggctatattgagacccactgccaccagatccgggactacaccctgaacaagcagaagcagaccgacgactacccctacggcggcggctgcggcatggtgctgtacgcccagcccatcgcggactgcctgcgggcggtgcagcgcgaggtggcccagcagggacgccccgccccgcatatcgtgttcctgacggcgggcgggcagcgctacaccgaggagcacgcaaagcgcttggcacagtacgacaacctgacgctggtctgcggccactacgagggcattgacgagcgtgtcatcgatgcttttgcggacgaggagatctccattggtgattatatcctgaccggcggcgagctggccagccttgtggtggcagacagcgtgctgcgcctgaagcccggcgtactggccgagcagaagggctacgaggaggaaagctactgggacggcctgctggaatacccccagtacacccgcccagaggtgtgggaaggccgtgccgtgcccgaggtgctgctgggcggcgaccacgcaaaaatcgacgcatggcgcggtgagcagagccgcacccgcacccgtctgcgccgcccggagctgtacgagcagtggtgcacgagccaccccattgccgaagtgcccaagtggaagcggggcgagaatgtccggctggtaaagaccgctgaacagtttgccgccgccgcaaagctgtttgccgagggacggcaggctgtctgtgccgataactggacgccggaatactgccgcaccctgaccgagccgcagtttttgctgcaattgcagcaggaaaaggcggcgggctgggtgtgctacctgcacaccaccaaggacgtgccggacggcatggtgtgcgtcagccataaggcggggcatatcgagcacctgttcgtcacggaaaaagcccggggcaagggcattggcgcaaagctgctggattttgcccgcaaaaagctgccggagcacgcacacccggtgctgagtgttctgaacaccaacacccgcgccattgcgctgtatacccgtatgggctggcagctggacggcagcaccagtctggaatttgacccgcagcaataccccactgtgacgcgtaaatgcgcactggtgcagatgcgctacgcaggccctgcgcaggagtgagtcggcaccggaaatgtcggtgaaaatacacaaaattcagaggaaaactccccggcggtctaaaagttgttgaaaacttttgtattacccctctaaccttcggggtataattttattgtctttgtacaaaacctgaaaaatgctctcggtttcattgggaaaaccgccaaaaatgcaaaaggggactgtacaaccgtttcgacttgcgctaaaatgagtgtaacacaacaggcacactatgcttttgtacaccaaaacgatattagataggagcgctttactatgtacgtaaaagaagttaccgttgaaaatcaggttggtctgcacgctcgtccggctaccttctttatccagaaggcaaacgagttcaagtcttccatctgggtcgaaaaggaagaacgccgcgtgaacgcaaagagcctgctgggcgttctgtctctgggtatcgttggcggcactaccatccgcatcatcgctgacggcgctgatgagcaggctgccgtggacggcctgatcaagctggtggagtccggctttgcagagtaagtctgtatcacaagcaacagaaagcggcgggggctccctgccgcttttttagtacgctttttaccgggagcaaagggctttctattgcaggacgccccatcccacaaatacggaggaaggtgctgcatgactaaggccgagctctatcaaaaagcctgtatgctgccgctgctgcccggggtgtatatcatccgggacaaaagcgacaccatcatctatatcggcaaggccaagcgcctgcgcatccgggtaagccagtatttccgcgagggtgtgccccacgataacaaggtcagccagatgatcgcccatgcctatgcctttgacgttatcgtctgtcagagcgagttcgaggcgctggtactggaagccagccagatcaaggcgcacacccccaagtacaacattctgctcaaggatgacaagggttacagctatatccgcgtcacccgggaggactggccgcgcctttccttcaccctgcaaaaggaggaggacggggcggagtatatcggcccctacacctccagctttgcggcgcggcagatggcggaaacggccatggatgcctttctgctgccgcgctgctccaagcgcttcccgcaggagatcggcaaaggccgtccctgcctgaacgcccatatcggcaagtgcatggcggtgtgcagcggcaagatcagctgcgagacctacaatcaggcggtcaaaaacgcggtgcaccttatccgctacggcaaaaaggatatcctgaaaaccctcaacgagcggatgcaggaggcctccgaccggctggaatttgagaccgccgcccttctgcgggatcagatcaatgccatcaccaagctgacggcagggcagaaggtggtggtagacccggacgtggagatggacgtggtggcacttgccggtacgccggacagtgtgtgcgcggcggtgctgcgcttccgggagggacggctgaccgacaagcgggagtttttgttccacgatacctcggatatcgacgcggtgcgggaggaatttctgccccggtactatctggacgatgagcagattccgaaaattatcgcggtggacgcactgccgccggatgtggatgccttgcagcaggcgctgaaccagaagcggggcagcgaggtgcagctgtatgtgccccagcggggcgataaagcgcatctggtagagatggcgcacaccaacgcggtggagcgtctggcgcgggagagcggccgctacgcccgggaggaaaagctgctggatgaactggcgcaggtgctggggctttcaaagccgccccgcgccatcgagagctacgatatctccaactggggcgacggcagcagcgtctgcggcatggtcaccttcaaggatggcaagcccttcaaggcgggctaccgcaagttcaaaatgaagaccgtggcgggcacggacgactacgcttcgctggcagagactgtttcccgccgggcggcagagtacgaaaaatacgctgcacaggcagaaaacggacagcccggcggcaactggttcgggcagaagccggatcttttgctgatggacggcggcaggggacaggtgaacgccgcaaaggaagcacttgccggtacggcactggcagatgtgccgctgtacggcatggtaaaggatgaccaccaccgcacccgcgccatcgtggacagcaacgggcgggaaattgccatcaacatgaaccgcggcacctttaccttcatcactgccattcaggacgaaacgcaccgctttgccaacgcctaccgcaagcagcagatgaagcagaaaagctactcctccaccctgaccgaggtgccgggtgtaggccccaaaacggccaaagccctgctggcgcagttcaaaagcgtgggcgcggtgaaggacgccacccccgaccagctggaaaacacccccggtgtgggcaaacagctggcacagaccatctacgagtattttcatcaggcataaacacaaaaccgcccctcttctctggcgcaaagccatggaagaggggcggtttctgttatgaggggcgttatctttcagtgttcagatcgatcagccctctggcgtaaagattcaggatcccgttgggaccggtagaggtatagcgtttatcgtatgtcttgctgccgatgcgtacaacattatccgtgcgggcgtcggtcgtgtagtcggcggggtcgccatccagatgcagctggatgcagcgggtcgcggtgatattggcgtattctgcaacggaaaggtgatcgatcatgcatcccccggcaggaagctcgaccagcaggtcgcgggtcacggtcaggtcttcggcacgcagaccgccattggtcagcgcaacattcagcgttttcagctgcatgggcgcaaggcggacatcgccggtctccaagccgatgatcagccgggtgagggcgtctgccgggatggtgacagtgagcatggcttccggggcattctcggctacctgccagttttccggcatttcaaaggtcagggtagtgcggccatccccgccggtgtggcgcagaaccggagaatgcgggaagttgtcgaactggaaggtggcgtatttgtccgaggtgagggatgggtcggtgacaaaggtcacagagccgtagttcaggctgagcttcagttcctgatccagcttttccagcgggatctgtagggtgctttccccaaggtcatcagcaggaatggtgagggggacggtatcggccaggacagcgaggtagctgctgctggcctcctccgggacagagctgctgtctgctgccgaggacgcaggctcgaccggctgcaccggggtggccttggagtgctggaagaaaaagcaggccagcaccagcaccgccagcccgccgcccagcaccatgcgccagcgggaacgcggggcaggggatgccggggcggcagagacgccttgcgggctttgctcgtccagaattttgcgggcgacctcctcagggctgcccagctccgcaatggcgcgggcttcgttttccggcccggcggcatccagataatcttcgtaataactcaaagcgtccttgcgctcggtctccggcaggggagccagaagctgctccagcgcagcaagaaatgcagtacgggtcatagatcattccacctctctgaaaaatgtgtcaatggaagaacggtagcggttccactcctgcgcgtaggcggcaagctgcgcccgcccggcggaggtgatctgataatagcggcggttgcggccattgaagggcgcatcgtagaccgtgagcagctggtccttctgtaaccggcgcagcaccgggtacagggtggattcgcttagttccagcgtgtgggtgacctgttgggtgatcttgtagccgtaggtaccttccggctcctgcgccaccacggacagcacaatggcgtccagcagcgcggcactgatgggaaaactcatgcaggaacagcctcctttcggtgtggtatgtttctataatattatatatcatataatattgcataagtcaatagggaatttaccccttcagccgcctgcggcgtcagctcccccaagggggcgcctttggtatggcggtacagtttctggtgcaagcgcaaagtttccggtttcgccagagggagttcgttcctaacaaaaaagctccccctttcgggggagctggatgcgaacgaagtgagcagactgagagggccgagtttctcagttttcagaagagatatcctgtccgaagtacttttcgctcagggtctttaaggtgccgtcggcgcgcagctcctcaatggcggtgttcagcgcgtccagataggcggtgtcctcgcttttgagcaccgggatggccacatgagaggcatcggcggtctgtgccaccagcttgaaatcggcctccgggtggacgttcaggtagtcgtagaaggaaacgtcggcgttcagggtggcatcaatgcggcctgcggtcagcagctggatggtctcttccagcgtgtcgataccctgcacggtagcaccgtagctttcagccagctccatgtaggtagaagccagactgttggcggtggtcttgcccttcaggtcctcaaagctggtaatgtcggtattgtccttgcgtacagccagcgcagtgtggatgtagccgtagggggtggtgaaagcgtaggtcttggcacgctcctcggtcacctccacgccgttgcacaccatgtcgtaacggccggcgtccagaccggcaaacaggctgtcccagtcgctttccacatactccggctccacgcccagcttttcggcaatggcgcgggatacctccacgtcgtagcccaccagcgtgtcggaagtgtcgtggtaactccacggctgccatgcgccctccagtgccaccaccagcttgccgctcttttggatgctgtccagcttattcagtgttgcggaactggcagtgctggcggcggtgtccttggaggagcagccggtcatggacagcaccccggctgcggccataacacccatcagagaaataaaggttctgcgtttcataagtaaaaattcctttctgtcgtaaaaaatgcaaaaagagaagtggttttattccgtatgggcgatcctgcgcaggaaagcccgggtgcgctcctccttgggggatgcaaagaactgctgagagggtgcctgctccaccaccacgccgttttccataaacacggtcttggaggacacgttgcgggcaaagcccatctcatgggtgaccaccagcatggtcatgccctcttcggccagctgccgcatcacgctgagcacctcgccggtcagctccgggtcaagggcgctggtgggctcgtcaaaatagatgatctccgggtcggcggcaagggcgcgggcgatggccacccgctgctgctgcccgccggaaagctggcgggggtagtagtcggcgcggtcggcaaggcctaccttggcaagcatcttcatgccgatttcatccgcctgctccttgggcagcttccgcgccacaatgagcccctcggtcacgttttgcagggcggtcttgttgcggaacaggttgtagttctggaacacaaaggcggtctttttgcgcaaccgggcaatgtcggcgcggctggcatgggcaaggtcgaagctttcgccgtcaaacaccaactgcccggcatcggcagtttccagaaagttcaaacagcgcagcagggtggtcttgccggagccggacggccccagaatggccacaacatcgcctttttccacggtcaggtctaccccgcgcagcacgggcagctcgctggcggtctgccgcgcaccggggcggtggaaaaggccgggctttgcgtaggtgcggaaggttttttgcacattgcggatctcaagcatagccataggtgcgcacctcccttttactgaaagccgcgggcgttgagctgacgttccagcagcgcctgcagcttggtgatgacggtacagaacagcagatacaccacagccacctcgcagtagatgggcaggaagatgtaggtgcgggcggccacccgctgtccggccatgaacagctctgccaccgtgatattggacgccagcgaggtgtccttgatcatgccgatgagggagttggacagcgcaggcacggcggtgcgcagcgcctgcggcagcacgatgcggcgcatgatctgccaccagctcatgcccacacagtacccggcttccagctgcccctgcggcacgctttccagcgcgccgcgcatggtctcggcgcagtaggcaccctcgttgaaggcgaaggcgatgaccgccgccggaaaggcgtccagcatgatgcccacgctgggcagaccgtaaaagatgatgaacagctgcaccagcagcggggtgccccggatgacccagatgtagaaccgggcgatctgccgcagcaccggcacattggcgtactgcaccagcgctaccgccaccgcgatgatcatggcaaaaaagaaggagagaagggtcagcggaatggtcatggtcaggcctgccgtcaggatgcggggcagtgcctccaccagcacgccgaccgtgcggttggataaaagtgcttcaaacattggtttttcctcaaaataaaaatacgcagaccggcaaagcctttgccggctaaagcagtatataccttaaagtagggtcaaagtcaagagactgaatcaccaatccctacaaaacctaccagaatactataatagcatgaaacgccccgcagcgcaaacggtttgcacaaaacgcgtgatgtgaccgaaaaattgcataaacttgttaaatatttgtgcaatgcggcagatgcttgacgctgtgggtgctttcgtgtacaatgaacataacagtgcgcagctgcggggcaacggcccggcgcggcgcaaatccaccggcaggagctcctgcccggtgcagacacggaggatacgaacgtgaaaaagtttagtattggtgttctgggtgcaggcacctggggcatggctctggcacggatgctgaccgtcagcggcaacgatgtgcaggtgtggtcggctattgaagccgaggtggacaacctttccgccacccgggtacaccccaatctgccgggaatggtcatcccgcaggaactgcgttttaccaaaagcatagaggaagtgtgcaccggcaaggacgtgctgctgtttgcagtgccgtcggtgttcgtgcgctccacggcagccaaggcgcggccttatatccgctccggccagatcattgtggacgtggcaaagggcattgagcccgataccttatataccatgaccgagatccttgccgacgagctgagccacgagaacggcccccgggcggtgcgtctggtggcgctcagcggccccacccacgccgaggaggtggcgctggatctgcccaccaccatcgtttccgccagcccggatctggaagctgccgaggtggtgcaggaggtgttcagcaacacctgtatgcgcgtgtacaccaacactgatatcaagggtgtggaactgagcggtgctatgaagaacgtcatcgcgctgggcgttggcatctccaccggccttggctacggcgataacgcccgcgccgccctgatcacccgcggcattgccgagatcgcccggctgggcgtggcgatgggctgcaatgtccagacctttgcgggtctggccggtatcggcgacctgatcgttaccgccaccagtatgcacagccgcaacaaccgcgccggtatcctgatcggcaagggcgaaagcccggagcaggccgtgaaggaggtaggcatggtggtggagggcatcaacgccctgcccgccgctatggaactggcggagaagtaccatgtggaaatgcccatcgcccagacggtgaacgccatcgtcaaggagggcatgagcgccagcgacgcgctgcgcaacctgatgtcccgcgaccgcaagagcgagatgccgcagggctatgagagcgtgtgagcctgaagggttttgttgcacaaggtcagcgtcctcgccctctcagtcatcgctgcgcgatgccagctcccccaaagtgggagcctttggcagtccacgcgaagtttatctttttgccaagggctctccctttgggagagctgtcaaggccgataggcattgactgagagggcgagccatctgaaaacaaaagcatctgcaaaaaagttcgctgattttctgaaaattcagaagcgaatgttgcggatgcttttttgttttgcatgattttgcctttttacagatggatgggatggttgccactgtgcagcaaaattattaaaactttttacagaaaacagacacaaaagggtagaaggtcggcaaactttctgctatactggaaacgataggatttttggtcagtgcagccggaacagggcggcgggcgctggcactgcaagaaggaggaatgagagatgccctctacctacgcacaccgccgctttggcgcaaatgtgctggatcatctgcctgcgccgctgcgggaaaagctggaagcgcaccgggagctgtacgatatcggcctgcacgggccggatctgctgttctattaccatgcagaaaagtccaccccggtcgccgcgctgggcaacgccatgcacgacgagccgggcagaacgttttttgaccgggcacggcgggtggtgcacgaggaagccgaccgcgaggcagcgctggcctacgcgctgggctttgtgtgtcattttgcgctggacagcacctgccacccctttgtggagcagttcacccgggagagcggtgtgacccactgcgagatcgagacggagttcgacaatatgctgctgcgccgggacggctatgacccgctgaccttctttaccgccagccatatccaccccagcgcggaaaacgcccgggtcattgcgccgttctacagggatatttcggagcagaccgcgctggaagccctgaaggggatgattacggtgcataaggtgctgcaggcttcgaacccggtcaagcgctgggtggtgctgaccggcatgaaggtgctgggcaagtatgatgggatgcacggccttgtggcaaacccgcagccgaacccgcagtgcaccgagagcaaccgcaagctggacgcgctgtacgccaaggctttgccgctggcagagcggctgatcttagagtatgtggcaaagctggatacggacgagccgctggatgccgcctacgaccacacctttggggaattttaaaaaacgcgccgcccggcggtgcaaagagaacaagggaaatacgatgaaaactgaaaaattcaaggtgacaccgctggagcgggcatggatcttatacgatgtgggcaactcggcctttgtgctgatgatcgccacgctggtgcccatcttcttcaatgcgctggctgaagccggtggggtgagcaaggtggactatctggcctactggggctacgcaagttccatcgtcacggtggtcaccgctattctgggccccattctgggcacgctggcggacaccaagggctttaaaaagcccatcttcatgctctgcctttttgtgggcgtcatcggctgctgtgccatgggtctggcgggcgcatggctggcctttctggtcatttttatcattgccaagatcggctactccggcagtctggtgttctacgactccatgctgggcgatgtgaccaccccggagcggatggacatggtgtcctcccgcgggtacgcatggggctatatcggcagctgcgtgccctttgtggtctgtctggcgctggtgctgggcagcagtgcagtggggctcagccagatgactgctttgtccatcgcgctggtcattaccgccgtgtggtggctggtggttaccctgccgctgctgaaaaagtaccgccagatcaactatgtggaggtggagcagcacgccatccgccagagctttgtgcgcattgggcagactttgaagcacctgccgcaggacaagcaggtgttctggttcctgctggccttcttctgctatatcgacggtgtgtataccatcattgacatggccaccgcctacggcacggcattgggtctggacaccaccggactgctgctggcgctgctggtcacccagatcgtggctttcccctcggcgctgatcttcggccgtctgagccagaaatatgaatccaagatcctgatcccggtgtgcatcgcggcctataccggcattgccgtctttgccttcttcctgaagagccagtggcagttctgggtgctggctgttgtggtggggatgttccagggcggtgtgcaggcgctgagccgcagccactttgccaagatcatcccgcaggaaaaatccggcgaatactttggtctgttcgatatctgcggcaagggcgcttccttccttggtactatgatcgtcagcgtgggcagccagctgaccggcagcgccaatgtgggcgttggctccattgccatcctgttcgtcatcggctttgtgctgttcggtatttctacccggacggaagagacaaagcgggtctgagccttcgcggtgaaacgctctttataacggtacaaaggactgctgcacggcatctggtgcagcggtccttttttgctgcaggcggcacaaaacagaagctttttcggaaaaaataaaaacaggtgattgattttcaactttgacttgcttataattgaagaaaaatcatctgctgcactgcggcggcagagagaatgcggggtgcaaacattgaaacacaaaggaattgcggtgttgctggcgggaattatgctggcggcgctgctgctggcgggctgcacgtctgccgacactgcccggcggatgcgcatgggcgtagctggagagggcagcgtataccacgcctttggcgagggctttgcggcgctggaaaatgacagcgggaatggcgctgtggaactgaagaataccgccgggtctgcggcaaacctgcgtctgctgatgggggattacctgcagctggcggtggcacaggcagaccttgtgcaggatgcctacgagcagagcggcatttttcaggatgaagagatggaaaacaaattctgcgcggtcgctgcactgtataccgaggcctgtcaggtgatcgtgcgggcggattctgatatccagtccgtagaagaattgcagggtaaaacggtgagtatcggtgcagaggagtctggttcagagcagaacgcatggcagatcctgtctgcctacggtctgaacgaaaaactggtagagaccatcaacctgaattacgaggatgccgctgcgcagctgaaagctggcaggatcgatgccatgttcatcacggccggtgcgcccagtgcggtggtgaccgcgctggcggaggactgcggcatccggctgctgtgtgtggacggtgcggctgcaaagcgtctgcaggacagctgcagcagctacagcgtgtgcaccattccgacgggcacttaccccggacaggaagaggaagtgcagacggtaggcgtaaaagcagtgctgctggccagcgcggcgctgccggaaaagcaggtggagcagctgacaaagctgttgttcgacgggcgcgaaaacctgagcacgcagctgggtatccggctggataccgaagccgaagcgaccgagggcgtgggcatcccgttccacaagggagctgccgcctactataagacggcagacatcacggtggcatcctgaatgctgccgggaaacagagggaaagaaagacgatatgaagatagaactggatatgtatcagacactggcactttcggtgctggtgctgctgctgggcaaatttttgcgggagcgggtgcggatgctggaaaaattctgcatcccggctccggtcatcggcggcgtgctgttcgccatttttacctgtgtgtgctacgttaccggcgtggcagagttcgcctttgacgacatcctcaaggaggtctgcatggtgatgttcttcacctcagtaggctttcaggcaaacctgaaggtgctgaaaagcggcggcagggcgatgatcgtatttctgggcgtggtcattgtgctgatcgtcagccagaactttattgcagtggggctggcaagcctgctgcaggtggatccgctggtggggctgtgcaccggctccattcccatggtgggcggccacggcacggcgggtgccttcggcccggtgctggaggattttggcatccggggcgcaaccaccctgtgcaccgccgccgccacctatggactgatcgcgggcagcatgatgggcggtcctatcggcaaaatgcttattgagcggcaccatctgctggacactgcggtgacagaggatgacagcctgctggtggaggaggagatcaagcacgagcggcacagtatgtaccctgcggccagctttcagctgatccttgccatgggcatcggcacagtgctttccaagctgctgtccctgaccgggatgaccttccccatctatatcggtgctatgatcgcggcggccatcatccgcaacgtgggcgagtacggcggcggctacaccgtatatatgggcgagatcaacgatatcggcggtatctgcctgtcgctgttcttaggcatggcaatgatcaccctgaagatctggcagctggcagagctggcgctgccgctggtcatcctgctggcagggcagacgctgttcatgatcgtgtatgtcattgtggtggcgtataacgtgatgggaagggactacgatgcagcggtcatcgtttcgggtctgtgcggcttcggcatgggtgctactcccaatgccatggccaatatgcaggctgtgtgcgacaggtatgcaccttccgtcaaggcatatctgctgatcccgctggtgggcagcctgtttgcggatttcctgaacagtctggtcattacggtatttatcaactttatctgagacgtccggtgtgcgcacggagggagaaaatcctccgtgccggaaaggagaaaaggctatggccatccatcagcggctgaaaaactggttccggcagaagagccggagcagaaagaacggacaggaagaaacggtggcagtgccggaggtgcacaccggcaaggtgcggcacgaagcggcggacagcaccccggaggcagactgtcccatccattacgacaatgtagccatcccggagatccatattcatccgcggaaaaaataaggatacaagagtgcacaacagccgggcctgcgggtcaggctgttgtgcttttttgcgctttctcctccccaacaaaaacaccccctgcagtctgtacgggcagaccgcagggggtgcttggctttttagatgctcaaagaattagaggaacacatacttgaggatgaacagcacggtgagcacatacatcagcgggctgatcttcttctccttggccttgccggtgaccacgttgatgatggtccaggagatgatgccgatggcgataccctcggagatgctgtaagcagtgggcatagccagaatggtcaggaaggcggggatgccctcgctgggatcgttgaagtcgatcttgacggcagagcccatcatgtagaagcccacgatgatcagagccggagcggtagcaaagctggggatggtgaggaacagcgggctgaagatggtagccagcaggaacagcacgccggtggtcatagcggtcagaccggtgcggccgccctcggtaacgccggaggcgctttccacgaaggtggtggtggtggaagtgcccagcacagcgcccacgcaggtgccgatggagtccgccatcagtgcgcccttgatgtggggcagacggccgtcctcgtccagcatatcagccttggaggccacgccgatcagggtgcccagcgtgtcgaacaggtccacgaacaggaaggagaacatgactgcgaagaagttcagcaggccgacaccggagaagtcggtcttgaacacctgaccaaaggtctcgcccagtgcggagaagtcgaagctgacaaaggcggtggggatgacggagtacataccggcttccacatcggggacgtagatgccggtcagctcgcacacgatgcccagcagccaggtgatcaggatgccgtacaggatgccgcccttgacctttttgaccagcaggatggcagtaatgaccacgcccagcagagccagaatagcgcccacgccaacgctgtggaaggttgcgcccttgaagtgctggtaggtgaccagcgtggaatcgctgttgacgatcagcttggcgttctgcaggccgacaaaggccacgaacaggccgatgcccacgctgacggcgctcttcagggtcatgggaatggcgttgaagatgccctcgcgcacattggtcagggacagtgcgatgaagatgacgccctcaacaaagacggccatcagcgccagctgccagctgtagcccatggtcagcacgaccgtgtaggcaaaataggcgttcagacccatgccgggagccagtgcaaaggggtagttggccagcacagccatcagtgcggtggcaatgaaagatgccagcgcggtggcgatcagcacagccttggaatccatgcccgctgcggacaggatgttggggttgacggcaaggatgtaagccatggtcatgaaggtagtgataccggccatgatctcggtctttacatcagtgtggttttctttcaggtgaaagaacttttctaacatgagaaacctcctgcttccaataaaacactccgccggttgcggacggcggagaaagaacagctcccattctatcagctgaaaacgtttttgtccacatcagaaacacacaaatttcgcaatttgttcaaattttcttaaataagtatgacttatctgacaaaaaatatgacattttttagtaatttggacggaatgcaggcaatttgtgcagaaaaagtgtgtgtgggaaaaagtagttccgaaacacccgcagggtgtttcggaactacaaataaaatattttttacaaatgaccggcgcttacagcgtctctacccggtcgaacagatcctttgcggcttccacggcgtccttgctgccaaaggcaacccgcacgccgccggaaagtacgtcagacagggcagcggcctgcgctttgagcagggcggcgtccacgctgcacagcgccttgcggtcggcggtgcgcatctcgtccgtgatgccgcagaagtaccggtgatccagctcccgggcagcggcacgcgccttgcggggcgtgtccagcttggcggcggtgcctacgatgaactcgtccagatcccgggcggtgtagtcccgggcggcaagggcggcaggagcggcggcaaaggtctcgtagctttcccgcaggtgggggtcccggtaggtgtacaaaaactcgatgccgtctgcacagagcattccggtgccgtaggcaccgcccacctcccggatggtgtgccacaggtactcgtagctcatcacccgcgccagcacccggcggcggctgtcccggggcatgggccaagccagcacatcgtagttcacgccgccgtcaatgataaaggcttcgttcaccgggggcgtcaggggctgggtgtagggctgcgccggggtgcgccgggcagcggcaaagtggctttccggcagcagggtgcgcagcttttccagtgcgtcctcggtgccgtgcaggctgacggtcagggcagcgttttgcagcacccggctgcgcacagcatccagctttgcgcccagcgccgcccagtcggccttttccagcagaccgcacaggaagtgataatagctcacgccggtgcaggcttcgtccgcagcgccctctacataataatgggcgcgggcacgggtggaagcgaactcgttgccctgctggataaacagttgttccatgcgcagcttcagctggctgaccacccgggcataggccgcttcggcggcagcgtcggtaaggacggtgtcgtacagccactcgccgccgatctccaccgccttttccaggctgcgctccagcaggctcaggcagagggaaagcttcgcatggcagggactgccctcctgccgccctgtccagagatccagctgggcgcggctgtcgcccagccatgtgctgcgcagggtgttcagctgctgggcggtgtgggcgggggtgtccagctcgtccagcacatcggtgagcagattcagatattgcagttcctccggggtgatgctgcccagatcatagtagaaattcaggtacaagctgccggcagaggggtggcgcagcaaggtggcaccggccagctgctcagcgctgccctgcggggcggtatcgcccgcgccaaggtcggcggcggtgagggggtgttccagcaccagcttgccatcggtgcgcaccggggcggcgtcctccgttttaggtgcggtggggatctgcaccacctgcaccggggcgggggcaaacagctcccgcagcagggtgtcgaaccagccctcttccagcttattgcgcagggcggcgaagagcttgtcggtgtgcagcagcagggcggcatcgccggtatgcagccagccggtggcggcgttgatggcgtccagcacaccgtccggcagactgcccgggcgctccagcgaggcaaattcggcctcgttcaaagcggccagcagcaggtcgtgaggaatgccggtctttagcagctcgtccacagctttgcgcacagcgggggcaaatttgcgggcagaatccaccgtagcaccgcgcagcagcagctccaaggtgggctgcagggtgctgtcgtcaaagccgatgtcgatatccgcgcccagctgctcggccagcagcgcggccttgaggggggagctgttggtgcttagcagcgcacccagcaggatctccacgcccagctgccgctcccggtcggcaaaggcaccggtgtaccatgccagtgcgcactgcacctcgtccggcttgggctggtcggtgtagtagggtagctccacgaacgcgccgggctgctcgtcctgcatggtcaggcgggggcgggcagcggccttgggcatcttggacaggtagtcctgatccagccgcgccagcttgtcggccatatccattttgccgtacagggtgatgcagcagttgtcggcgctgtaatggcggcggtacacccgctggtatttctcgtaggtcagggcggggatggacgccgggtcgccgccggacacaaagccgtaggcagtatccgggaacatcgcccgttgcagggcgttttgcagctgagcatccggggaggccagtgcaccctgcatctcgttgtagaccacgccgctgaccgtgccgtccgcgtcccggtgccagccctcctgctcgaacacggcagagtccaccatagccagcgggcagaacaccgcgttcaggtagacatccatcaggttgcagaaatcggtctcgtttggggtggcaaaggggtagaccgttttatccgggaaggtcattgcgttgaggaaggaagccatgctgcttttgagcagctgcacaaagggggaactgaccgggtatttttcgctgcccgccagcacggagtgctccagaatgtggaacacgccggtgtcatcggagggaaaggtgccgaagccgatgccgaaggccttgttgacgtcctcgttctccaccagcagcacggctgcgccgctgacgtcatgggtgagcagggtcaaagtaccgtgctgctcggggcagtcctcggtgcgcaggacggtataaccgggatagtgtgccatttttattctcctttaagggatatttttcacagaggatacacctgcggctcagccgccgaacaggccgaaaaagctggtgtgggtcacgcccagcacaagaaaaagagcaatcagggcgaacagcacgccgatgatgatatccatctggtgcaccgtgagcgggaatttatcataaagcttttccttggggtttacaaagtccttgttgccgttgtccagcaggcgctttttgccctgctcaaaatcggccttctgtgcctgcaattcagcctgctggcgggcaagttctgcctcgcgggcggccagtgcggcctcgcggcgttcaagctcggtctgggtatccggggtgggctgtgccatggaaagtccctcctgtaagcataagatgttttccttatgataccacaaaaatgtggacaaaaaaagcacccgcagtgcaaagactgcgggtgcaaagggggatgatgaggagattacttcttagccagatacttgcggatatcaatggcgacagccacgataatgacaagaccctgaacgatgtaggtgtaggaggagttgacgttcatgaactgcagagcgaccttcatcagctcaaagaccagaacgccgaccagaacgccgggaacagtaccaacgccgccggtggtggaaacaccgccgatggtgcaggctgcgatggcgtccagctcatagcccattgcagtgttgacggatgcgccgccggactttgcagccagcaggcagcctgccagaccgaacatacaagaggccaggatgtagatgcggatcttggtggcgttgacgttgacaccagccacctcggcagcagcttcgttgccgccgatggcgtacatatacttgccgtgacgggtcttgttgtacaggaaccagaagcagacagccacgatcaatgcgatccagatcagcacggggaccttcaggatggtgttggaggccagagaggtgaagtttttgttcaaagagccgatgggggtaccgccggtgtacacaaggcagataccgtagaccacctgctgcatacccaaggtagcaatgaagggctgcaccttcaggtagctgaccaccagaccgttgcacagacccacgatggcgcagatggcaatgaccagaatgaacaccacgggggtggacagggtgggcatattggggtagaacttgccggaagcgccttcggtctgcgcaaaaatgcaggcaaggcaggcggcaaaaccagccagacggccagcggacaggtcgttaccggtggtgatcaggcagccggaaatgcccagcgcgatgatgtagcggatggacacgttcttgaacaggttgatcatgttggtgccggagaagaagttggggtgaatgatgccaacgatcagagtgatggccagcatcatcatgataatggcgttgttgctgagccacttgcccacagccttgccattcaattttttggtagcttccacgatagacagcctccttaattactgatttgccgcagctgtgtcaggtgcggtctcgaactgggtagccagcgccatgatgttctcctgggtggcatccttaccgttgataaagccggtgatacggccatcgcacatgaccatgacacggttggacataccgatgatctcgctcatttcagaggagatcatgataatgctcttgccctgcttggccagatcggcgatgatgcagtaaatttcatactttgcaccgacgtcgatgccgcgggtaggctcgtccagaatgagcacatcggggttgttggcaagccagcgggcgatcagcaccttctgctggttgccgccggaaaggctcttgatctgggtcttggggctgggcaccttgatggccattttttccttgttggtagccaccagatcgaggatctttttgttgtccagcatgatggggcccttgcgcagggcatccagggaagcgatggagatattatcggcaacgctcagcacacccagaatgccggtagcacggcgatcctcagtcagcagagcaacgctcttgcggatggcatcgcggggctgcttgatggtaacttcctcgcccttgatccacaccttaccagaggtatgggcacgcaggccgaagatgccttccatcagctcggtacgctgtgcgcccaccagaccggcgacgcccagaatttcgccctttttcagctcaaagctgcaatggcggaaggaacggggatggatggaggtgaagtcctccaccttcatcatgacctcgtccgagggcacgttctccagcggggggaacaggttggacagctcacggccgaccatctttgcaatgatctcttccttggtcatgttggcaacgtcccacttgccgatgtactggccatcgcgcatgatggtgacttcgtccgcgatcaccttgatctcgtccatcttgtggctgatgtagaccagagcaacgccctgctccttcagatcccgcatgatgcggaacaggctctcgacctcattcgcagtcagagaagaggtgggctcgtccaaaatcagcaccttacagttggcggaaacggccttagcgatttccaccatctgcatctgggcgatgctcaaagagcccagctttgcatgggggtcgatgtccagcttcagtttcttcagcagttcatcggtatctttgtacattttggcatggtccacaacagtgacgatgccgtatttcttggtggggtagcgtcccagccagatattctcggccacggtacgggccggaatgggctgcagttcctgatgcaccatggcgatgccacgatccagtgcatccagcggggtggggatggttaccttctgcccctcgtattcgatctcgccctcgtccatcttgtaaatgccgaacatacatttcatcagagtggacttaccggcgccgttttcgcccatcagagccatgactttgccgggacggagttccagctgtgcatgatccagggctttgacaccggggaaggtcttgaccacgcctttcattaccagacggtattctgacattccgcaaaagcctcctttttggttgtttacaggcgggcagtttttttccaaaataaggcgcgtgcgtggagatgttttctcgcacgcacgcgctttttagcttacattcaagccgttaaggcctgctgcgcaccttgcattggttccgggaaactttggtcttacttcaggtactgagaagcgttgtccttggtgaccttgacgtagtcgacccagtagtacttctcgacatccttgccctcaacgaacagcttggtagcctcggcagccttggtagcctggcccacgtcgtcgttcagaacggtaccggtcatgttgccgtccacaacgttctggacagcctctaccagagcatcgacgccgaccagatagatgtccttgccgacggtgcggtttgcctgctggatggactgcagagcgcccagtgccattgcgtcgttgttgcagaagacgacttcgatcttatcgccgtactgagacagagcgtttgcaacgtcctgctgagcggtggtctgatcccagttgtccaggtactcgtacaggcactcgacttccttgcctttatcggtcagagccttgatggagtactcggtgcggtactgagcgtcgatgttctcggggtcgcccttgcacatgatgtaggtgatcttgccgtcgccgttgatatcgccctgagtctcggtatccaggatcagctcgccctgataagtaccggactgacgtgcgtcagcaccaacgtagcagcacttgcccttgtaggaatccagcacgctctcctcgggctcacggttaatgaacacgatgggggtgccggagggagaaacggtgtcaacgatggtctgagcggaagtggtctggacggggttgatgaccagcacgtccacgccctgctgcaggaaggtgttgatctgctcggtctgggtgttctggtcgttcttgccgtccatgatggtgacggagtagcccatatccttcaggtagccttccagatcggagcggtacagggtcatgaagttatcagcaaactgatagatgcaaacgccgatgttggcagagccgttggtagcagcggcagaagcagcggtggaagaagcaacgctggaagcagcggtgctggtggaggaagagccgccgcaagcggtcatagcagcggtagcgcccacaacagcggaagccttcaggaagtcgcgacgagaaatcattttcataatagtaatctccttcatttgtgtgtcacagcatattcacagacgcatttgtcgcatgtgtccgtaatccctgacagtattatacccttgtatgggggtgttccgcaagagaataagttcacaatattggtgcaaatgttttgttacgtttctacaaaagcggaccaaaggttacaaaatcttttcgcgaattatcacaatttttcatgccgatgcaaccaacatacaaatatgatgcaggtatgtaaaaaaatatgcttgaacatgactgaatgttgcatgactgctaaaaaaccgcgaaaaggggcgatacatttcttgaaagatattttcagggatactacgcagcggaaagaaaatgccttttatacagccttgcctagcgagaaaaacaacacaggtcgagaaaagctctgctccccgggtgggggtggtgctgcgaccttggggtacggcgccgctgtacctttatagtgatagggcgtgcgggacgcagcgaacgtttttgtgggaggcgtccgaaatacaagcggacgttttttgcgtgccgcgccagtcgggataacaaaactgacgaaactgcgttgtgccttgaaaatgtaaaatatacaacgaggaaaacaactgcacaaaaatacctaatggccccacaaaagtgcacactgtcgggtacggcgggcgggtgatatcctgtgtacagagcccgggacaccggacgaaaggaggaagaacatcatggggcagacaaagcccgccgccgggctgaagagcctgagccgcgccgccgataccctgagcaccctgctggcgcaggaggtgaaggaactgaacgagcggcagaaggccgcccggcgggaaaacacccccgaccccgggatgatgaaggggctgaaggaagccaccgccgtgctcaaggatctggcgggtgtggtaaagaccctgaacgatcagggcacagaactggaagggacagagtgcggcgtggtgctgctgccgccggtggaacaggaggaaaaggcatgagcaggactgagcgtgcagtcatcgtgtggaagccgcagccccggcagctggaatttatgcgcagaccggaaccggaagcgctgtacggcggcgcggcgggcggcggcaagagcgatgcactgctgatcgaagcgctgcggcaggtgcacatcccgcattaccgggcgctgatcctgcgcaagacctacccacagctttccgaccttgtggataagagccagatgtactaccgccgggctttcccggaggcgcagtacaacgccacctcccatgtatgggtgtttcccagcggggcgaagatctggttcggctctatgcagtacaccaaggaccgcaccaactatcagggcaaagcctacgattttatcggctttgacgagctgacccactttgagtgggacgagtacagttacatgatgagccgcaaccgtcccaccgggccgggcacccgggtgtatatgcgtgccaccaccaaccccggcggcatcggccacggctgggtgaaggcgcggttcatcacccccgccccgcccggcacgcccattgtggaaacggtcacggtgcgcctgccggacggcaccgaccagcagatggagcgggcgcgggtgttcatcccgtccagcgtgtttgataaccctgccctgctggccaacgaccccgggtatctggcaagccttgccagcctgccggaagcggaaaagcaggcgctgctctacggcagctgggacagcttttccgggcaggtgttcaccgaatggcgcaacgacccggcgcattatcaggatcagcgctggactcatgtcatcgcgccctttgccatccccaagcactggcccatctggcgcgggtacgacttcggcttttccaagcccttttcggtggggtggtatgcagtggacgaggaagggcggctgtaccgcatcaaggagctgtacggctgcaccggacgccccaacgaggggctgcgcatcgacccggtggagcaggcaaagcgcatccgggaagccgagcagaacgacccgctgctgcggggcagagtgatccacggagtggcagaccccgccatctttgacgagagccggggcgagagcattgcagccatgatggagcgcagcccgcattttctgcgctggcagcccggggaccacacccggctggcgggcaagatgcagttccactaccggctgcggttcgcgccggacgggcggccgatgctgcaggtgttcagcagctgcaagcacttcatccgcaccctgccgaaccttgtgtacgatgagagcaatgtggaggatatcgacacccggcaggaggaccacatctacgatgagtgccgctatgtactgatggagcatcccatcagcccgcccgaagcttctgccgcgccgccaaggccggacgacccgctggagctgcaccggcaggcgcggttctaccgcatctgaaaaaacaggacagaaaggaaagattatggaagatacaagagcaaaagccctgcccatcggcgcggcagaggcggcggctgcgctgcagacgctgcagcgctacaaggcgggcaaggcggcgctggacaagcgcctgatcgacaacgagctgtggttccgcatgggacactggaaaaactaccgcgacccgctgatgcccggcaaggcgcagccctccagcgggtggctgttcaacagcatcgccaacaagcacgccgacgccatggacaactaccccgagcccatggtactgccccgggcagcagacgatcaggccacggcgcaggcgctttccagcgtgctgccggtggtgctggagcaggcagattacgagcaggtgtacagcgatgtctggtggcgcaagctcaagcagggcactggcgttaccggcatcttctgggacccggcggcgcgcggcgggctgggcgacattgcggtgcgcagcgtcaacctgctcatgctctactgggagcccggcgtgcaggatattcaggactcgccggacttgttccacctcagccttgaggacaccgcccggctgaccgcgcagtatccgcagttggcagggcacgccgccggtgtggtggacgtgccccggtacatccacgaggacggccagaccaccgccaacaagagcgtggtggtggactggtactataagcgcccggacgagaacggcaaattgcggctgcattactgcaagctgtgcaacggcgtggtgctgtatgccagccagaacgacccggcgctggcggcgcgcgggctgtacgaccacggcaagtacccctttgtgttcgacccgctgttcgtggaagaggattctcccgccgggttcggctacatcgacgtgatgaaggactgccagaacgccattgaccggatgaaccacgccatggatgagaacgtgctgctggcctcccgccagcggtatgtgctcagcgacaccgccggggtgaacgaggaagagctggccgacctgagccgggacatcgtgcacgttgtgggacgcctgaacgaagattccttccgtccgctgcagacggcgggcctgcagggcaacagcctgagctatcgcaacagccgcattgaggagctgaaggagatcagcggcaaccgcgacctgacgcagggcggcaccactggcggcgtgaccgccgccagcgccatcgccgccttgcaggaagcgggcagcaagctgagccgggatatgctcaagagcgcctaccgcgcctttgcaaggcagtgctacctcatcattgagctgatgcggcagttctacgacgagcagcgggtgttccgcatcaccgggcagcgcggcgagagcgagttcgtgcccttctcggcgcaggggctgcgcgcaaagcccatgcccgccgtgggcggggtggagctgggcagccgggagcctgtctttgacatcgtggtcagcgccgccaaaaagagcaccttcagccgcctgtcccagaacgagaccgccaaggagtgctataagctgggcttctttgaccccgccaacgcggacgctgcccttgcggcgctggaaatgatggactttgaaggggtggaaaaggtgcgcgcccgggtgcggcagaacggcacgctggcgcagcagctggtgcagctgcaagggcagatggcaagactgtctgccgctcttgcgcagcagcccggcggcacccaagcggcgcaggacactgccggtctgacggcacagctgccggtggcggcggctgcccgcgccatgaactggaacggaaaggaggtgaagtgagatgatcaaggtatgttacagcgagctggacggccccgaggggctgagcctgcggctggaagccgccggtcacgcgggctatgcgcccgccgggcaggacatcgtatgcgctggcgcaagcaccctgatgcaggcactggtgtacctgctggcaggggaggaaaacgcccgcagcgatgcatgggacgagccggaaggcccgcgccttgctgtggcagcgcaggcaccggtagcgccgtgggtgcagggtgcatttgaactggccaaggcgggctttaccctgctggcagagcgctacccggacaacctgcgctttgcggatgtgagccgcagcggacagcagagcatgatggacctgcagctgtttgcggaaggtgagactgcccccgcattgagcccggagcagacccggcaggcagtggctgcgggcaccttgaagccggaagcccccgccgcgcagccggaagcaccgcagcagaccccggcagagccggagccgcagccggaaaagcctgcacagccggagcgtccggcactgccttccctgccgctgccggtgcagaacacggtgcgcggcctgcacgcccgctgggcggcagaggaagcggccatgcgccgcagccagccgggttttgacctgaaagcagagctgaagaacccggagatgcgccgtctgatgcagctgcccgggatgcgggtgcaggacgcctaccgccttgcccactacgaggatgccctgcgcaccacggcacagaccgtggagcagggggtggtggaacgggtgcagcagcgcgccgcgcgtccgctggaaaacggcctgcgccccggtgctgcggcttcggtacggccggacgtagccgctatgacccgcgcccagcgggaagccttggagcgccgtgtgctgcacggtgcacagatcgaactttaacctgacaggagaaaggaaaaaacatgatgaatttcaacatccagctgtttgcggacgcgcagaccaacaccaccggcaccatgtcggtggagatgaaaaccttttacgagaagcgcctgatcgatcaggcagagccgcgccttgtgcacgaccagtttgcggattactaccccgtgccccagaacggcggcaagaccatcgagttccgcaagtacgacagcctgcccaaggccagcactccgctgaccgagggcgttacccccaacggtcaggccctgaacgtgaccagcatcaccagcgacctgcaccagtacggcggctggaccccgctgaccgatgtgctgcagatgaccgccatcgacaacaacgtggtgcaggccacccgcgtgctggcaagtcaggccggccgcaccatggatagcatcacccgcgatgtgctggcgggcggcaccaacgtcatttacgccccgaagctgggcgcagacggtgccgagaccgccgttaccagccgcaaggcactggacaagagctgcaccctgaccccgaagctgttctttcaggcagcagcgcagctgggcgcaatgaacgccgaccccatcggcgacagctacgttgccatcatccacccctatgcggcctacgacctcaagacctgcaaggagtttatggaggtgcacaagtacgccgaccccgacaccatgttccgcggcgagatcggcaagctgggcaatatccgctttatcgagaccagcgaggccaagatctggaaggacgatacctgcccggcgggtcttgcagtgttcggcacgctggtgctgggcgcccacgcctacggcgtgaccgagctggagggcggcggcctggagcacatcgtcaagcagctgggctacggcgacgacccgctgaaccagcgcgcctctgtgggctggaaggggatgcgtgccgccgagcgtctggtggagcagtacatggtgcgcatcgagagcgtgtccagctactctgccaccgctgccgccaactaaggaggtgcccatggctgaaaagaacgtgcgcatccggctgttcaaggacaacagccgctacaagggcgatctgttcgttagcgtcaacggtgtgaattacaagatccgccggggcgtggaggtggaggtgccgcccgctgtggccgaggtgctggaacacagccagcgtcaggacgaactgaccgctgcccgcattgctgctgcggagaacgcggcacagtaaaatctgtaaaatcaacgctgcccggctgggagaaatgcccccggccgggctttttataaaaaggatgtgatgaagatgacagtaggagaagctttggagcgtgccgagcagctgcgcccgaactgccgcattgaaaccgagacccggctgcaatggctgcgggagacggacgccctgctgcgcacaaagctgtttgaccgcagcgccgccggggcgtttgacgcggtgggcgcagaccgtccgtgggagcagccggtgcaggacgaccagccgctgctggtgccgccgccctttgatgcgctgtacccgcacctgttgtgtgcgcagatggacgccgccttgggcgagaccgaccgctacgccggagagcaggcgcagtacaacgccctgtatgcggaactggcggtctggctgcggcagaactacccgccccgcagccgggcgcagtggcgctggtaaggaggtgggaacatggtactggcagacagaatacggcttgccaacacccggcagctgctgcgggcctttggcggcctgaacgagacctacggctgctcggaagcagagtacagcgccggagtaaacttttctgcccgggatttcccagccctgagcacccgcaccccgcgccgcaaactgcgggcgctgaccgggctgaacgggatgtaccacctgaacggtctgctgacggtctgcgggcgggatatcacctataccccggacgatgccgcagccccggcggtgacgaaggcggacgccgtgaccgatggccgcaaggcgctggtgggcatcggcacaaaaattttgatcttcccggacaagctggcttttgatacggcagacggcagcgtgaccgcactgggggcgctgtggacggcggcggacaaaagcgtgacctttgccccctgcgatgccgcaggcaagacctatcaggtggaagcctttggcagggacgagcccgccgatccggcagacggacagctgtttttaagggtggaggatgccgaccatccgtggcggtacgacagcacgctggaaatgtacagcaaaaactccggcagctgggcggccatcccgctggaatactgccgcatcacggcggcagggctgggcaagctgttccggcagtgggacaccgtgaccgtgaagggcgcagccgccgagactgcggggcagagcccggagctgaacggagatcagatcgtgtatgacatgggcgaggactggctgcgggtgcgctgcaccccgcagggcgagtatttttacggcacactggtgcagaacgccgccgccgcgcagtggcagagcatggacggcaagcagcaccgcagtgtggatgccgcacagacggtatccatggagcgccgggtgccggaactggattttgtgaccgagtgcgacaaccgggtgtggggctgcaacagcagggagaacgttatctacggctgcaagctgggcgaccccaccaactggttcagctaccggggcatcgctgcagacagctacgccgtcactgtgggcagcgacggcgcctttaccggggcggcttcctgcatgggctatgcgctgttcttcaaggagaacaccctgcacaagctgtacggctccaagccttcggattttcagctttccagcctgcgctgccggggcgtggcaaaaaacgccgcccgcagcctgtgcgtgctgaacgagacgctgtattatctctcgccggacggggtcatggcgtgggacggcagtctgcccaccaaggtgtccggcgcactggacgccgcaaagcttgccaacgtgcaaagcgccgtgggcggtgcgctggatggccggtactatctgcacatctcccgggagagcgcgcgtctgctggtctacgataccgagaaagggctgtggagcgaggaggacgtctgctcctgcgatatgaccagcaccggcgggcagctttatctgtgggacgggcaggcgctgtgggcagcagaccccacccgcgagccggactggcagagcaccgatggcgtggagacggacatcccctttgaactggtcacaggcgatgtgggactggacggcaccgagcagcggtacctctcccggctgaccttgcgtctggacgccgaacgcaccagcacggtggaggtggcagtaagctatgacggcggcgcgtgggagacggtggccacccttgccgcccaaggccgccgccgcagctatgacctgccttttgtgccccggcggtgcgggtcgctgcggctgcggcttcgtggcaaaggacagatcaccctgcgcagtcttgtgcgcaccatcgccccggcaaagggaaaattatgggaggaggatatctcatggcaagcatgaacggcctgagcaagctgggtctgcccaagctcagcgataacatggacccggaggatgcccgggcactgcgcagctatctgtaccagatgcaggagcagctgcagtatgtactgaccaatctggatacggaaaatatgtccgacaccctgcgcagcaagctgcagggattataagtgcgaaaggagaattttatggcatccaaaaagaaggaggaactgctgcagccggacgtgcaaacgcaggcacagcctgctgcgcagtccacttacagcaccgaggggctggacagccgcgccgaagtggaaaaggctatggcaaacgccagctaccgccccagccagcaggtgaccgatgcagccaacgccctgaagcagtggcagcagaaccgccccgcagactaccagagcagctatcaggacgggatcaacgagctgctggggcagctgctggaacgggagaattttcagtacagctacacccgcgacccgctctatcgccagtacgagcagctgtataccctgaacgcccacaatgccagcgcggacgcggcggcgcaggcggctgctctgaccggcggctatggttccagctatgccaccagtgcggcacagcaggcttatcagcagcagatcggcgggctggcaagcgccatccccaccttgtacagtctggcgctggatacctaccagagcggcggcgaggaactggtgacccggctggagcagctgaacggacaggaacagaacgcccagagcttatatgaccggcagctgcaggactactacacccaattgcagcagaagggcgatgcctacaacgatgcctacgccaaggactacggccagtatcaggagcacctgaaccggctggacaccctgcacggctactacaccgcgcaggagcaggcgcagatcagccagcgtcagcaggcttttaataatgttatgaccgtgctgggcgtcatcggggatgtggtgcaactggccatcagcggcaccaccggtctgggcagcttagcgggcagtctgctgaacaccgggtacaacatctactccggcaaccgcgcctacgaggccgagcgcgccgacacccagtggagccagcagatgcaggagaagcagcgtcaggacgcactgacccagcagcagtacgacaacaccgccagtgagcgcgcctatcaggacgcgctgaagcagcaggctttcaacaacaacgtgaccagccagaagctgaacatcgccaagggcgagtgggcgctgaagcaggcgaatgcccagcaaaaggccgcgcaggctgccggcaaggcggctgcgggcacaaagtccggcagttccggcagcggcggaaaggccaccggcagcagcggctctgcttccggcggcagccgcagcaccgtcagcgccggggtgccctacacggcagcgctgctgcgcagtcagggcaagagcgaggtagccatcacctctgccctgcggcaggagggctacacccccgcccagatcgcaaagatcctgcaggagatgaatcaataaaataaaaatctccccggcaaagcagctactttgccggggagatttacctttatggtatattttgaacccactggacaccccaccaaataaaaaaatccgctgtgaaaacagcggacagtagtcaccccggtagacattcctgaagattgggacccgcgggctaagcaacagcccactgggctgattgcttacgctgccgctggcgcgtcagcgccgccctgttcgagcccactggacaccccaccaaataaaaaaatccgccgttgcaatgcaacagcggattttttggtggggtgcccagtgggactcgaacccacggtctccagatccacaatctggcgcgttaaccgactacgctatgggcaccacatagatgcgcccgaagggactcgaacccccggcccactgcttagaaggcagttgctctatccacctgagctacgggcgcacgttgttatcccaatgggttccattatggcggcagttctgtgtcggcacaggctgcgagagaaataataccatacccatcgcattctgtcaaggaaaatctgaaaaaagtttcaacttttttgcgctgcgggcaaaaacagacgctccggtgtgcacaaaacggccttacagcagccacattccggcaaagcccagcacaaagcccagcacaaagccgcacaccacgtcccgtacatgatgtaccccggtgagcacccgcagacagcagatgagcagggcaatgcccaccatcacgcagcccgcagcggggtagaaatacagccacaccgccgccagcacggcggcgctcagcgcgtggcgggaaggcatggagtgcccacggctctcctttgccaccagcggggtaaagccgggctgctcgtaggggcgggggaagtgcagccggctgcgcagcagcgtgccgccccagaacaccagccccggcacaaagacggaacgggcgatgagcaccataaagtccagcgcggcctgcttctgggtgaggaacagccgcgaaagccggacgttcagcaggcacagcagcaccggatagcacacaaagggtaccagcggcaaccaccgatccagaaaaacgaccagccgctttacagccgggtgggtgttgaaccagtgatagatgggcttatactgttcggcggtcaaagcagctctcctcctgtcgggtcggacatcagaagcaggtgtccagatagttttccacatcaaagggctccggggtggaatccttgcgcaggtacagcgggtggtgcgggtgtccctttttgctgcgcttgccaaaggtgacccacgggatctcctgctcccgcgtcagggctaccatctcccgcatcagaccgggcaggtagtcccgcttttcgatcagggtgccccatgccgcccacatggtaggctcggtctgcgccagcacggcctgcagccagcgcaggttttcatcgcacagggcgcggtcgggggtcttatccatatcgttggggtcggtggcgcgctgggggtaaacgttgaacatgatccagctgtcaaagccgttggcggcggccagacgctccacactttttaaggtggggtccagcgcgccgggctgggcggtgctggggttgatgccgatgcacaccagcgggtgcttgcccacacgccccagaacataacggtagttttggtaggtgtggggctcgtaataccatacgccgccggcgtattcgcccgcctcaagcacgggcagagaaacggtctgcatgatagtaaactcctgtcggttttgaatgtcgttattatcgtacctgaatctaccgggaaaatcaacagttttagccccaaaatactgccttatttctgtttttgtggtatactgggggtgttccggtgcggcagggggactgcggcaccgcgcttcgcttacagaaaaaaggagttcttatgctggaagattataaaagtgcactgcgcgcagggcagcgcgcctatcgtgcccgcatagcccgcggccagtcgccctatctggctgttctggacgatgtgctcaagggcgtggatatcgtggcgcaggagccactgggtctggtggagatcccatcggacagtcttgtgggcaccaagaccagcggacggcacactgccttttcgtatgactttatgcccttgctggagccggataccgagtttgctgtcaagtggtcgaacctgtgcgacgcgcatctggaagagggcatccatacccccatcatcgcctttgagtacatgaaccagttctatgtgcaggagggcaacaagcgggtctcggtgctcaagtattacggcgccgtcaagatcccgggcacggtcacccggctcatccccgcccgcaccgacaagctggagaataagatctactacgagtttctggatttctataagctgtccaaggtgaactatgtgcatttctccaagctgggcggctatagcaagctgcagacgctggtgtgcaaggccagcggcgaggcatggtcggaggatgaccggctgaactttgccgccttctacaccatgttccaccagcagttcgaagccttgggcggcacgtccatggggctgactaccggcgatgcgctgctggtgtacctgtcggtgtaccgctactccgacacctacgacgccaccccggcgcaggtgcggcagaacctggaaaagctgtggaacgaggtaaaggtgcttaccgagccccacggtgtggaactttcgctggacccgcccaagagccccgcagagccgcttttgtccaagctgaatatcttcagccccagcaaacagcccagcgagctgcgggtggtgttcctccacgagtacaacgccaagatcagcgcatgggtgcgtgcgcatgacgaggggcgcgaagcgctggctaaggttttcccggacaaggtgtatatcagcagctacgaggacgtgaacccggaggtggacgcggagcaggtgctggaggagatagcccacaacaatgcagacgtggtgttcaccaccagcgtacggatgtacaacgcctgcctgaaggtggcggcgcagcaccccaagacccgtatcctgaactgctcgctgaacgcgccgcacccgctggtgcgcacctactatccccgcacctatgaggtgacctatctgctggggatgctggccggtattatgaccaagaccgggcatatcggctatgtggcggcgaaccccgtgtatggcgtgcccgctgcgatcaacgcctttgcacaggggctgaagagtgtgcgcccggcaggccgtatccggctgcgctgggcctgccagactgatgcagcccacccgctggattttgccgactgcccggagatcgacatggtctacgcccgggacagccgggagcccgccgataccaatcgggactatggtctgtgccgcaagctgccggacggcagcctgcagccgctggggctgccgatctggcggtgggataccttctatgtggagatcgtgcgctccatctttgacggcagctgggacaacgcagccaccacccgtgcggtgaactactggtggggtctgcgcagcggcgcagaggatctggagtatcaggaaacactgcccagcggtacgcggcagctgctggatctgctggaaacgctgcagggctcggataatgtgcacatcttcccggaaaagctgtatgataacgaggacaacctgcactccccggagaatagagtttacagccccaaagagctgatggagatggattggctggatgcctgcgtacacggcaagctgccccattacgatgaactggacgtcaagacccgtaccgtgctggcgatcaacggactggacaacgtaaagggtctggaaaaatgagccggcctgaccggagacagaatggagcatacgaacgtgaaaattcttgccatctcagatgtcccgtccaaggcgctgtgggactatgacacccgtgcccggctggaaggcatcgacctgatcctctcctgcggggatctgcccaagaagtatctggaatatctcacaaactttaccgctgcacctatcctgtatgtgcacggcaaccacgacggcagctaccagaccgagggcgagcccggcggctgcatctgcgtggacgatcaggtgtacacatggaaggggctgcgcatcatggggctggggggctgtcagcgctataataaagaggacacctaccagtacaccgagaaagccatgcgccgccgtgcgcacaagctggagcatcaggcgcacaaaaagggcggcatcgacctgctgctgacccacgccccagcaaaagggctgaacgatggggacgactgtgcccacaggggctttgagtgcttcaacgagattttggatgagtaccagccgaagtggttcatccacgggcacatacacctgaattatgatgcaaagctgccccgggtatgcacccgcggcaacaccaccgtcatcaacgccaccgagcgctatgtgttcgagatcccggacccggacccggcagaagagcgtaagaccctctggcggatgctggggttctgagtgattgctgcttatgcaaaaaaagacaccgcacagctgtgcggtgtcttttttgtttatggagccttattgtgggaatggcgggcgcggcaacagtgcggtgcagcctgcggccctgtggaaaaaattacagttccagtttgccagagaatttgttgataacgtagtaggctgcgccctcctcgggcttgacgtacaccttgcaggactgcacgccgaccttgtgggtggtgcggtagtctgccttggcacggtcgatgatgtcggtgatgttgtactgctcaccgcccatctccacgtacagctcgggtgccagcggcgggcggccgcggcgggcgggagccttggcggatttgcgggtcttgccctcggcagccggagcatcggctgcgggagcagaaactttcttttcaggcatgatgcataaccttccttctgtatttgattatggtgcagcagagctgcaccggcgggctccaatggatctatcgtaaggcagaagcggtgcggaaaacgcacgcctgtctgccccatacgaaccgatatgaaaacgtttgcataaagaagctgaatttataattatataatatgtttttgaaattcatttgtaaagcctttttcataaaaaacattgtaaaatcggtaagaaacggtggaataaatggtcggagcagggttttgatgcttttttttcgggtatagtacgacctttcggcaaaacaggcggtcgtttccggaaatgccgggcggcactgcggctataaatacgggcggcaaaaaacactccctgcaagggaggaataaggcggaacagaactgccggcgcacgcaggaggtaccgcatataaaaaagaaacgtcccgacaaaatcgggacgcttcttttttatgccggtggtgggggtcgaacccacacgtgttattagcacaagggattttgagtccccctcgtctgccattccgacacaccggcgtatcattttgtgagcggtttttattataccggatttgacaggtaaaatcaagagggagtttttacggaaaatgcagcataaaacaaaacgttacactcctgtttatgtgtcgttttgtgcgcgggagaaaaacagactttgcaaaaactgcgataaaacaactgaaatgcgaaggattttgaataaacgacagagcgcggcattgctttgcttccgttgacgagaccgaaaagggcggggtataatcaggctaaaacaggagctttgcagcagaagaatgcccgcaggaggtaggaaaatggcagacgaacgcaacagaatgctggagcagttgaacacagacgactggcaggaatgccgtcagagcgtgttgatcgtggacgattctgccatgaaccgcaggatgctcaccgagatactgggcggacgctttgataccgccgaggccaccagcggggaagagtgtctgcacctgctggaggaaaacagagacggtatttccattgtgcttctggacatccacatggaaggaatggatggctttgcggtgctggaggagatggaccggcagaaaatgctggaggatatcccggtcatcatgatctccagtgaggacaaggtggacgccatgcgccgcgcttttgatctgggcgcgtcggattacatcagccgtccctttgacgcccgggtggtgtgccagcgcatcggcaataccatgcggctgtacgcgaaacagcggcggctctgcgctgcggtgaaaaaacagatccgggaagcggatcagaacagccggatcatgcttgcgctgctgaaccgggtaatggaaaagcgcaacggcgagagccggaaccatgtgcggcgtatccagatcattaccgcactgctgctggcacagctggcgcagaaaaacgggcagcactggcttacgggctctgtgcgccgccgcatcacactggcggcggcgctgcacgatatcggcaaaatagagctggaaaaccggctgctgtgcaataccgacccgactgcggaggaagagacactgctgcggcagcatacaacgctgggtgcacagatgctggaagaaaacagtacccggcaggaagcggcttttgtgcagacggcggcacagatctgccgctggcaccacgaacgatatgatggctccggctatcctgatgggctggtgggagaacagatcccgctggaagcgcaggtggtggggctggcagatgcttacgatgcactgaccggcggcgaaaacgggcgtccttacccccacaaggcggcggtgtatctgctttgtaccgcccaaagcagccagttcagcccgctgctgctggaatgcctgcaggagatcggcgacaggctggcagaagcactccgtgcaccggaaaaataaacattataataaggtgcgcggggatgctccaaggcgtttgctgctgcgatgaaaaaagtcttacttttcctcaaaaatcagataaaatttgcgaaacggtaaagatttggtcggttttttgtaagaaactcacattctctttaaggaaaaggaaaaacagctgtgcaaggcgcagaaaatccatacatgaaacaaattgatatggaacaatcgacaaaatgtgataaaataaaactagatatgcgcgcttgtgtgcatggtacggatggtaaacagcaataaggagttatgtgactatgtctattgaaatttcccctaagtccttctttgagcagcccagtgtggcggatatgcggctgatcgcctgccccggtgcagaggagctgaccggcctgatcgacaagcaccttgtccgttgggcaaaggctgccggaattgaaaaagacaccttcattatttcctgcgactgcccccgcttccagagcggtgatgccaagggtctggtcaaggagtctgtccgcggtgacgatatctttatcgtggtagacccgggcaactacagcgtcacctacaagctgttcaactacgagaaccatatgtccccggacgaccactttgcaaacctgaagcgcctgatccaggctgtggccggtaaggcacaccgtgtttccgttattatgcccagcctgtacggcggccgtcagcaccgccgcgtggtgcgcgagagtctggactgcgctgtggcgctgcaggagctgcagaccatgggcgtgcgcaacatcatcacctttgacgcacacgatccccgcgtgcagaacgcagtgcccctgatgagctttgataatgccatgcccacctatcaggtgctgaagagcctgctgaaaaaggatcccaccctgtccttcgacaaggagaagttcaccgtggtcagcccggacgagggtgctatgaaccgcaatatgtacttctccagcgtgctgggctgcaatctgggtatgttctacaagcgccgcgactacacccgcgtggtgaacggccgcaaccccatcgttgctcatgagtatctgggcgagagcgtggagggcaagaccgtctttatcgcggacgatatcattgcttccggcgagagtatgctggaggtcgccagcaacctgaaggagcgcggtgctgccaacatcatcgccaacgccaccttccccctgttcaccagcggtctggacaagttcgacaaggctgtggcagacggcaccctgacctacgttgtgggcaccaacctgacctaccgtatgcccgagctgctgacccgtgattggtatgtggacgtggacgtttccaagtacgctgcctactttgtggtggcactgaaccacgatatgtccgtttccagcatcatcgaccccctgaagaagatcgagaacctgctggcaaaccgcaagtaagaagctgttccaaagcccctgcaccctgtgtgcaggggctttttgcgttttcatagagaaaaggaagtgtatcatgagaaacagcagcgttatagggaactttcgctgatcagctctttttacaaaaaataatatactaatatattaattgtaacaaaaaacactaaatactatttacaaatcttgatgtaaatggtattatttgtacaacattgaagcagaaaggcacctgctgtgaggaaaaagtccgagaaaaagcaagcgagtccggccttcaaagctgggcataaaaaagtacgcagacacttacaagaacaagaaggagaaaacaatatgaaacgccgcgattttatgaagctttccgccgctaccgcgctgggcgctactgtagccgccatggcaccctcggctctggctgcaacagagctgaaccagaccaacggagatctgcacactacagtagaccgcaagactgcagccatgggtctgggcgatggcaagacctttgcttatgacccggaaaaaccgtacctgaacgtgaatgtgggcctgttccatgatgcgcaggtaacagtgggcggtcagaatgttggcactgctacctattacctgcccgatggcatggatccttgggcgccggcagttatcgtgctgaccccggatgacaccaccgcaaaggcgttctccggcacggtcaccggtcgtatgtggcgtacggtagcgtgcaaaaataagatcgcagttgcatttttcggtcccgaaaacggcggcagctggaacctttccctgagcgctgccggtcgcgatgatgcagcagcgctggatgcactgtaccagctgatgcgcaagaagagcgttaaactgtccggcgcattctctatggataagtcccacactgcactggtgggctacaaggagggcggcgcagctgccctgctgttcggtgctcgctgggcaagtgatttcagttccatctgcgctgtggatgcagccgaggtaccagcagcctctctggaggcagtgggcggtcagtatgtgctgccattccccggcgactccacccgcggcgtgcaggaggaagccattgccgcaaagacggtggatacccccgtttggctcgtccgctccaatgctgattctaccaataaggcagcgctggagttctacctgaaagccaaccaggctgtggcaaagggcgacggtgtttatgtcagcggccgtgcaggttctgcagccgaggtgtgggtcaccgaaaaggcacagtgcccggcagccatctgggaaaagttctccggtcagttcaagcgctttatggcgctgcagctgccgggccgcgtggcaaaggcagaggactttactcggcgtggctttgatattcacgaggagtgggtcaacggcgagttgcgccgctggatggtctatgtgccgtccacctatactggcaacgaaaaggtgccgctggtgctggtgatgcacggttataccgcctccatgtatgccattgcagaggagtcccgctggtacgatgtggcagagcagaacggctttatcgtggtctttgcgcagggtctggtgcgccccgcagacctgatgggcaacattcccaccgccatgtggctggcaggtccctttgccgcaatggccggtaaggataccgaccccagcgtggatctggagttcatcaacagcttgctggaccgcatggagcaggattaccgcatcgataccacccgcgtgtatgccaccggtcactccaacggcagcctgatgacttgggctaccgcctgccgctatgcaagccggtttgctgctattgctccggtcggctatatgtttaccccgctgccggagcttgaccccgctgttctgctgccggcatgggctttccttggtgagtacgactcggcaggcgtggcagagctggtggaggataacggcacagtgaaggcgctgcaaggctggaatgcccacaacgccaccaacgaggcagctgttgcagaaagctcctcctacaacggcgcttttgtgaccaagagctttatgggcggcaacgcaccgctggtgaagtacaccgtggtcaaggataccccccacgtttacctgcaggaggagagcgttgccatctggaacgagttcttctcccgttacagccgcggtgcggacggcaccctgtactatcagggcaatgccgtaaacgctggtcagtaccagcccagcgcaaactggtacgctgcaaaataagctgacaatgcccgccgcgcggctttatatctcgggacaccggaacgtctgcggacgctccggtgtccctttttatgttttgcggcggcttgtgttaagtttttgaaaattcgcgccgggagctttgcaaattccggtggatttatgctatatttaaattgaaatattttgcattctgacagaaaggaaaaacgccatggagcattttgtggagtttgaagatgtctgtaaatattaccagaccggcagtgtgaagatcgctgctgcagaccacctgaatttctatgtggacaagggcgagttctgcatcatcgtgggcccctccggcgcgggcaagaccacattgctgaacattctgggcggcatggacaactgcgacgagggcaacgtctggctggacggccgcaacgtgagccgtttttctgcccgggaactgaccacctaccgccggtacgatgtgggctttgtgttccagttctacaacctggtgcagaacctgaccgcgctggaaaacgtggagcttgccagcgagatctgccgcgacccgctggaccccgccgagaccttgcgcagcgtgggtctgggcgagcggctgaacaacttcccggcgcagctttccggcggcgagcagcagcgggtgtccattgcccgcgcactggccaaaaacccaaagctgctgctctgcgacgagcccaccggtgcgctggactaccgcaccggcaagcaggtgctgggtcttttgcaggatacctgccgcaagaccggacgcaccgtcatcgttattacccacaacacggcactgaccggtatggctgaccgcatcattcaggtgcgcagcggccgcatcgtgtccaatcaggtcaacgagcacccggtgccggtggaacagatcgagtggtgagaactgtgcagaaaagttaccgcaaaaatatcctgcgcgagatgaaaagcagcatcagccgggtggtgtccctgtttggcatcgtggcgctgggggtgatgatgcttaccggcctgatgtgcattgcccccgatatgcgcactgcggcccagaagtactatgtgcagcagaatgtgttcgacctgcgggtgctgtccacccttggtctcagccagagcgatatcagcgccattgccgctgtggacggcgtggacgccgtgcaggcggtgaagtatcaggacgtggagggacactggacaggggacgagcagaccacggtggcgcggctgtatcagctgcctgccgacccgcaggctgatacgccggagaacatgaaccgcttggtgctgttgtccggccggatgccggaagctgccggggagtgcgtggtgcacgtgatgggccacggcagccccgtggaactgggcacccagttgaccctgccggaagagaccgaaggggtcagcgggcaggtgttcacggtggtgggcacggtgcaggacccgctgcatttttccaccgattccgagagcagcaccgtgggtgatggccagctggactgcatcctgtttgtgccggagggcactttgaccgcagattattatacggcgtgctatataaaagcggaaaacgccgggctgtatgataattattcggatgaatatcaggccgcagtggatgccgtagccgaaaagctcaaggccatccagagcgtgcagtgcaccgcccggcgggaagaactgatggacaccgccaacgacaagctgaccgaagcacgcgcggagtacgacagccagaaggcagaagccgagcgccagtttgccgaagccgagacaaagctggcagatgcgcagcagcagctggatgccgccaaggcgcagctggaagccggggaaaaggagcttgccgcccagaaggctgcactgccggacaccatgcagagcggtgccgaccagctggtgagcagcgaggagcaggtgctggaatttgaggaacagttacagcagatagaactgctggtcaacctgaaaaaggtggccgaccccctgctgacctacgcggaagccgccctgcgcaacgccgaaaaggcgctggacgaagccgagccggaggacgaggattatattgaactgcgggatgcgctggccaaggcgcaggccgcttacgacaacatctataaccagctgcagggctatcagcagcagctggacgcgggcaagcggcagatgtacaagcaggggctgatctcctcgccaaacctttccaacgaccagctggtgaccgaagccaaggctgcgctgcgcaagatgaaattgcagcttttgcagggacagttgcagctgaccaccggcaccgccagtgcctacattcagttcgatgccgcacaaaagcagctggaagagggctgggcagagtataacgccgggcggactcagctggaagaatcccgtaccgagtacgagagccagaaagccgatgcacagcagaaactggcagacggccttgcccagctgaacgatgccgaggagcaggtgagccagatcaaaaagggcgagtggtatgtgctggaccgcacctccaccatgagctgtgtcacctttgcccagtacgccgaccgcatggatgccattgcccgagtgttcccggtgttcttcttccttgtggcggcgctggtggctaccaccaccatgacccgcatggtggacgagaaccgcctgcaaatgggtaccttaaaggcgctgggctactccaatttcagcatcgcgggcaagtatttgttttacgcgatgctggccactattctgggcagcatcgtcggtatggtggtgggctttgtggtattccccatcattatctggaacgcctatcagctggtgttcagcctgcccaccttcaccctgcacttctacccggatatggcagctgccagcgtgggcatcagcgccgccgtcatcggctttgccacatggtacgcctgccgttccagtctggccgaaaagaccgcagctttgctgctgccccgggctcccgtggcgggcaagcgcatcctgatggagcgcatcaccccgctgtggcagcggatgtccttctcccaaaagaccaccgcccgcaacctgttccggtataaaaaacggttcttcatgaccgtgctgggcgtggcgggctgcaccgcgctgctgctcatcggcttcggcatacaggattccctgctgcccatcgtcacaaagcagtctacggagctgacccacaacgatatgtccatcaccctcagcgaccccaaagccctgaccatggagcaggggctggcagaggagctggacagcaacagcgctgtgcagaactggggcgcggtgtataccaaatccaccaccatctacaatgccgaaggcgagagcgccagcgtgagtatcgtggctgccgccaaggacagcgacctgacccgctacgtcaccttccgtacccgcaagggacacaaggccatcagctttgacagcggcagcgccatcctgaccgaaaagaccgccgagaatctgggtctgcacaccggcgataccttctgggtggaaaacgccgagggcacccgggtggaactgaccctgaccggcatcacggagaactatatgttcacccggctgtacctcccccgcgcacagctggaaagcctgctgggcacggcggagatcccgtggaacacggtctacggtcagacaagttgcaccgatgctgccgggtacaacgccctgcgcaccgacctgctggaatgcaactatgtcagcagcatcagctttaccgaggacaccaccgaactgttcgacaacctcatcgtcagtctgggctatgtggtggtgctgatcatcatctgcgcggcggcgctggcggcagtggtgctgtataacctgatcagcgtcaaccttggcgagcgcaaaaaggagctggcgaccatcaaggtgctgggcttctacgatcaggaggtgtaccgctacatcttccgcgagatcgagctgttggcactcatcggctccggcgtgggtctggcactgggtgtgccgctgcacaagttcatcgtgctgaccgtggagatggatcagctcatgttcatccgcaccattgctccccgcagctacctgctggcggtggcgctgaccatggtgtttaccgtggtggtctgctttgtgatgcggcggcacgtccgacgcatcagcatggtggaaagcatgaaggccccggagtaatgtttacagcacattcataaaataagcataatttcgtaggatttttcgggtatcataaaattaccgggagggggagagccgcaagccccctctcagggacatgattcctcctataccccaaaccaaataccgcaaaaggccgcgccttgtctgaaccagcagatgagacgcggtcttttgtgtgtaggatgcgtctgcagtgcaccggcagaggagatcgtttttgctaaactgtgcaaaaaatacgggcagcacaggcggatatatcatgcaaaaaatacatccttgaaaaaagtggaattaacctattgacaaactaggtagaacggaatataatgcaaacatccaatccaccagtcttgtagggaaatgaaacagaggttccccggcgggcggagaccatagagggatggaaaagttttaccggaaggagggcacaaagatgaagctgatctggaaagaactgctgcacgcgaattatcgctgtgggcgaatgcatacccaccgggcaccggcatcggatgtgtactgtatgttgccctcggctgcgcgaatgtgtacccgaatgtgacagcagcagctccggtagaccacactgcccggtgcgcctttgaaaacgcatcgggattttttacacacaataataatactactggtatataaagagaggtaaataacaatggctgaatataaatttgagaccctgcagcttcatgtcggccaggagcaggccgaccccgccaccgatgcccgtgcggtgcccatctatcagaccacgtcttatgtattccgcaacagccagcacgccgcagaccgctttggtctggccgatgcaggcaatatctacggccgtctgaccaactccacgcaggatgtgttcgaaaagcgcattgcagcgctggagggcggcgtggcagcactggctaccgcttccggtgcagccgccatcacctacaccattcaggcactggcacaggccggtgaccacatcgtggcacaaaagaccatctacggcggcagctacaacctgctggcacacaccctgacccagttcggcgtcaacaccaccttcgtggatgcccacgaccttgcacaggtggaagcagccatccagcccaataccaaggctgtgtatctggaaacgctgggcaaccccaacagcgacatcccggatatcgacgccattgcagccatcgcccacaagcacggcctgccgctggtcattgataacaccttcggcaccccgtacctcatccgtcccatcgagcacggcgcagacatcgtggtgcactctgccaccaagtttatcggcggccatggcaccacgctgggcggcatcatcgtggacagcggcaacttcgactggaaggccagcggccgttaccccaacattgctgcccccaaccccagctaccacggcgtctcctttgcggatgccgcaggccctgccgctttcgtcacctacatccgcgccatcctgctgcgtgataccggcgctaccatttcccccttcaacgccttcctgctgctgcagggcaccgagacgctgagtctgcgcatcgagcgtcatgtggagaacaccaaaaaggtggtggagttccttgccaaccacccgcaggtggaaaaggtgaaccatccctcgctgccggatcacccggatcacgctctgtaccagaagtatttccccaacggcggcgcgtccatctttacctttaacatcaagggtggccgcgaggaagcctttaccttcatcgacaacctcaagatcttctctctgctggccaacgtggcggacgtgaagagccttgttatccacccggcctccaccacccacagccagctgaccgacgccgagctggccgagcagcagatctaccagaacaccatccgcctgtctatcggcaccgagcacatcgatgacatccttgccgatctggaagccggtttcgcagccgtccgcggcgaataagcagcgattctctttcccgcaaggggagtgtgatcttccttttattcctgtccaagcctccataagcgtacgacaagacccccggctgcccgccgggggtcttgtcatcataaaaaaagtggttcagaaacgcctgtgggcgtttctgaaccacaaattatactgccgtttttccgattagcggccgatcagcaggtcgcggcggcagcgcagacccacagagagggtggcgctgctgcccagatgccgcagggtgacgcgggtaccggacttctgtccctcgcacagcagcgagaggttcagggtggtggtgttcttctcggtcaccagcaccagcgttttcacgccgttggcctgcagcgcctgcatatcctcgatggtggtgcggaaggtagccacctcggcgggcacgtccagcgtcagcacgccgtccttctggcgggcggtgtacagcagctgcttgcccagcagacccttgacggtgtagcgcgcctcggtcttggcggtgtcggccagctcgtcgccggagatcagcataatgttgccctgaatggcgttgccctccggggcaccgtagccgccgtagctgggatccttttcccccacggcaacgtcggcactgtgcagtgcaatgtcgccctgcaccatctgctcctgcgggggcagatagccctccacgcaggtaggatccacctcggcggcaaaagcgcccacgctcagcatggcagcagcgcacaccgccacagcggcacagctcagggtacggacaaactttttgttcagcatcttcataggaaatacctcctgaaaacggcagccgcagggactgcctttgttttttgcatcataatcgttttttaaaccatggttcagctgcggcgcatccacaatggaaaaccgccgtatctgctttgtaaacggatacggcggccggattattgcgaaagattcaaaaatttttattttcagggattttccggtttgttttctgcatcatcgcggttgaggatatccatgaattcctcgccggtgatggtctccttctggtacagatactgtgccagctcgtccagctttgcgcggttctcggtcaggatgcggatggccttttcgtgctgggtcttgaccagctctaccaccttccggtcgatctcgcactgggtctgggcactgcaggccagcgaggtatcgccgcccagatactggttgttcacggtttccagtgccaccatatcaaattcatcactcatgccgtagcgggtcagcatggcacgggcaagctttgtagcctgctcgatatcattggacgcgccggtggtgatggagttgaaggctacctcctcggcagcgcggccgccggtcagggtggcgatcttgttttccagctcggccttgttcatcaggtagtggttgccctcgtccacctgcatggtgtagcccagtgcgccggaggtgcgggggataatagtgatcttttgcaccggggcagagttggactgcttggccgccacaagggcatgaccgatctcatggtaggctacgatgcacttttcgtggtcggtcaggatggagttcttcttctggtagccggcaatgaccacctcgatgctctcctcaaggtcggcctgcgtcacgctcttgcgccctgcccgcacggcacgcagggcggcttcgttcacaatgttggccagctctgcgccggaggcaccggaggccatgcgtgctacggtgttgaagtccacacccggggcaatcttcacctttttggcgtgtaccttcaagatctcttcgcggcccttcaaatcgggcagttccacgggcacacggcggtcgaaccggccgggacgggtcagagcagggtcgagggaatccgggcggtttgtagccgccagaatgatgacgccggtgttgccctcaaagccgtccatctcggtaagcagctggttcagggtctgctcgcgctcatcgttgccgccaaactggccgctgttgcgcttctgaccaatggcgtcgatctcatcaatgaatacgatgcagggcgctttttccttggcctgcttaaacaggtcgcgcaccttggaagcacccatgcccacgaacatctccacgaactccgaaccggagatggagaagaagggaacgttggattcgcctgccacggccttggccagcatggtcttgccggtgcccggagggcctaccagcagaatgcccttgggcatggaagcgccgatctcttcatacttcttggggtcgtgcagataattgacgatctcctgcaggttctccttggcctcgtcctcaccggcaacgtccgcaaagcggatgccgtgggtggactgcacatagacctttgcgttggatttgcccgcgccgccgaacatcatggcacccgggccgccgcctgccttttccatcagctttttgttcatctggttgccgatgaagctgaacagcagaatgggcagcacgaaccacagcagaaagctgagcaccggcgaaccctgctccacgatctcgctggagaattgcgcaccggcatcgtacaggcgctcggtcaggccggggtcgttcatcaggccggtcttgtagatctgcttgttgtccttatccgtaaaaatgatctggttggactggatatccaccttgccgatgttttcctgctcggtcatgctcataaaggtgccgtagtctacctcctgcacctgacgctcggccagccacggcatgaccacaaggttgatgaccagcagcaccagcagcacgatggcatagtagatggccaacggctttctggatggcttgacttctttcatgggatgttcctccttataaggtgggcttccacccgtttgctgcatccagtataccacatcctgccgcccggcaacagcgcagcgagggcaactttgcaaaaacttagcagtttcttaacaaagaggggagaatccccaattctgcatgattttccctatgatattatgaaatgctttcatctttatcctgaacgaaacttcttgacactttctggcaggcgtgctaaaattatctcactttcaacaaagtgcaaatgcgttgacggggataaaacgatcttttttctgcgtgcagagagccgccgggtggtgcaaggcgggtgcagagaacttcggatactggcccctgagcggcagaactgaacggacaagtaggttctgacggacgcccaccgttacaggggcagcgattcgccgttttggccgatcgtgcaaagtggctgtacctgaccgtgcagcaaggagagtggtaccacgggtgccctgtaaaagcaatttacaggctctcgtctctcaaggttttcgccttgaaagacgggagcctttttgtatgcggataccccttcaggcatcgctacgcgatgccagattcccctttttgtcacctacggtgacatcttcccccggagcgggggaagtcggccctctcgggggcgcctttgggcaatgccgcaaactttaccgcattccggaaagccgtccccttggggaaggtggatgcgagtgaaacgagcagacggaaggggtgcatttttatgcaccacaacatcaggaggacaacaggatgatggacgctaccaagtacgcaccggggtactacccggtacccgccggttatgacagctgggtaaaaaaagaccatattgaaaaggctcccgcatggtgcagcgtggatctgcgggacggcaatcaggcgctgatcgtgcccatgagccttgcagaaaagctggagttcttccagatgctggtgaagatcggtttcaaagagatcgaggtgggcttccccgccgccagcgagaccgagtacgagttcctgcgcaccctgatcgaaaaggatatgatccccgccgatgtcaccgtgcaggtgctgacccagtgccgcgaccacatcatccgccgcaccttcgaagcagtcaagggcgcaccccgggcggtgatccacttctacaactccacctccgtggcgcagcgggaacaggtgttccacaagtccaaggaggagatcaagcagatcgctgtggacggcgcaaagctggtaaagcagctcagcgaggagtacgagggcaatttcctgtttgagtacagccccgaaagctttaccggcaccgaggtggactacgccgtagaggtgtgcaacgccgtgctggatatcatgcagcccaccccggagcgccccatgatcatcaatctgccggtgaccgtggagatgagtatgccccatgtgtacgccaaccagatcgagtattgcgacaagcacctgaagtaccgcgacagcgtgatcatctctacccacccccacaacgaccgcggcaccggcgtagcctgtgccgagctggcagtgctggcgggtgcacagcgcgtggagtgctgcctgttcggcaacggcgagcgcaccggcaatgtggacgccgtaacgctggccatgaatatgtacagccacggcgtagaccccaagctggacttctcggatatgcccgccatctgcgccacctacgagcgggtgacccggatgcacatctacgagcgcaccccctatgccgggcagctggtgtttgcggccttctccggcagtcatcaggatgccattgccaagggtatggcgtaccgcaagcagaccggcgagcaccgctggacctgcccctacatcccggtggatccccacgacatcggccgcacctacgacgccgacgtcatccgcatcaacagccagagcggcaagggcggcatcggctttgtgctggaacagaactacggctacaacctgccccccaagatgcgggaggcactgggctacaaggtcaagagtgtgtccgaccacagccacaaggagctgagcgccgccgaggtgctgcacatcttcgaggatacctacctcaaccgcgcaaagccgctgaacgtggtggaagcccactttgcacaggtaaacggcattaccgccacggtcacgctggaactgaacggccagcgcaaggtggtcacctcggtgggcaacggccgtctggatgctgtagccaacgccatccagagcgccaccggcatggacttccatctggaaaactactctgagcacagtctggatgaaggctctacctcccgcgcggcctcctatgtggggcttgtctggggcgacaacacggtcacatggggtgccggtaccgacaccgacattatcgtggccggtatccgtgccctcgtcagtgcgatcaataatcgataaggaaaactcccccagtctgctacgcagacagccccctctgggatggggcctttggcaaaaccagaaagttttccttctcgccagaggctccctcaccgagggagctggcagcaccgtcaggtgctgactgagggagtttggacagcgtactcatgttttgaaagtaaaaaggagaaaactaccatgggaatgaccctgacgcagaagatccttgccgcacacgccggactgccggaggtcaaggcaggccagctgatcaacgcaaagttggacattgtgctgggcaacgatatcaccaccccggtggccatcaacgagtttgagcgcgccggttttgaccgcgtgttcgataaagagcatatcgccatcgtgctggatcactttgtacccaataaggatatcaagagcgctacccagtccaagcagtgccgggaatttgccaataaatacgatatcctcaacttctacgatgtaggccagatgggcatcgagcacgccctgctgccggaaaaaggcatcgtcaccgccggcgactgcgtgatcggcgcggacagccacacctgcacctatggtgcactgggcgccttctccaccggtgtaggctccaccgatatggccgcaggcatggccaccggcatggcatggttcaaggtgccctctgccatcaagttcgtgctcaccggcaaattcaatccccgggtgtccggcaaggacctgattttgcacatcatcggcatgatcggtgtggacggcgcactgtataaatccatggagttcaccggcccgggcgtggaaagccttaccatggacgaccgcctgtgcatctgcaacatggcgattgaagccggtgccaagaacggcatcttcccggtggatgaggtgaccaaggcttatcttgcaggccgcagccagcgcccgccggtgttctacgaagccgatcctgatgccgtgtacgaaaagaccatcgagatcgacctcggcgcactggagcccaccgtcagctacccccatctgcccgagaacacccatgttgccagcgagggcaaggacatcaagatcgatcaggtggtcatcggcagctgcaccaacggccgtttggaggacatggaagccgcatacaacatcctcaagggcaagcacatcgccaagggcgtgcgcggcatcatcattcccgccaccatggcagtctataaggagtgcatcctgcggggctggaccaccgcctttatcgatgcgggctgcatcgtatccacccccacctgcggcccctgtctgggcggctatatgggcattctggcagcgggcgaacgctgcgtttccaccaccaaccgcaactttgtgggacgcatgggtcatgtggacagcgaggtttatctggcctctcccgccaccgccgccgccagcgccctgaccggctgcatcaccgacccgcgcacggtctgacccgaaaggagcatgagcatgaacgcaagaggttctgttttcaaatacccggataacgtggataccgacgtcatcattccggcacgccacctgaacacgcaggatgccaaggaacttgccagccactgcatggaggatatcgacaaggactttgtgaaccgggtgcagcccggtgatatcatggtgggcggctggaactttggctgcggctcttcccgcgagcacgcgcccctgtgcatcaagaccgccggtatcgcggtggtcattgccaaaagctttgcccgcatcttctaccgcaacagcatcaacatcggcctgcccatcatggagtgcccggaggctgtggacgccattgaagcaggggacaccgttcaggtggattttgacaccggcgtcatcaccgacgagaccaacggcaaagtgttccacgccgagcctttcccgccctttatccagaacatcatctccgccggcggcctgatgaaggccatccagaaataaccccatccccatccgtgaaaatgtgtttggagcgacccgcgtttgcgcagcaatgaaagccccagtggggcttttaagcggcagagcggtctgcgttagcagatggaagggccttcgccctgacaagctccgcaggccgcgacaaacacgaaatataaataaaaattccgctgatcatgcgcagagcaacgcggagcgcattttaaatcgtccatcccccaaagagggcgtaaggctttgagagagtggggctatcaggggcgttttgagcatagaaggagtacctcatggaaaaaaatattgctgtcatctggggcgattgctccagcccggagatcgtaaaacagaccctccgggtgctggataaggtggccgaaaagtacggccacaccttccactataccgctgccgccatgggcggcgaagccattgataaatatggcgacccgctgccccagcacgagctggataagtgccttgccgccgacagcgtgctgctgggcgcggtaggcggccccaagtgggagggtctgcccggggagcagcggccggaaaaaggtctgctgcggctgcgcgccgggatgggactgtacgccaacaaccgcccggcgaagatctggccgcagctggcgcctgccagccccctgaagcccgagatcgtggcacagggcattgactttatcatcgtgcgggaactgatcggcggcgtgtacttcggcaatcacgagacccacacgctggaaaacggcgaaaagcaggccgtggataccatgccttatgcagagcacgagatcgagcgcattggccgcattggcttcgagaccgcccgcaagcgccgcaaaaagctgtgctgcgtggacaaggccaacgtgctggacaccagccgtctgtggcgcaccgtgatgcaccggctgcaggccgagtacccggacgtggagtacagcgagatgttcgtggacaactgcgccatgcagatcgtgaagaaccccgcccagtttgacgtcatcgttaccgagaatatgttcggcgatatcctgtcggacgaagcttccatgatcaccggctctatcggcatgatcccgtcctccagccttggtgacggcacccggggtctgtacgagcccatccacggctctgccccggacattgcaggcaaggacatcgtaaaccccaccgcctgcatcctgtctgccgccatgatgctgcggtactcctttggcatggcagcagaagctgatgccattgagaacgccgtgagccgtgtgctggacaagggtctgcgcactgccgacaacatgagcgacggctgcacctgccttggctgcactgccatgggcgatgccattctggcagagctttaagccgcagcgcgggacgatttgaaatgcgctccgctttttacgggttgcggcacccagcatccgcttcgtgccttgggcggcactcgcgtcttgctggccgctgccccaacaactcctccctgtttccgccactggcggcggtcgtcgtcgttgcactttgcgcatagatagcggaaaacatatttttatcagagcaatgccggacagccaacaggctgtccggcattgctttttacggcttcgtcagctcgtccagattctgggtgtagcagggcaggcagtgttccagaaaccagtcggcttccgggcagtgcatggcctgcagcgcagtgcgctgctgcgtgagtgcggcgtcaaattcgtggttgccgctgcgctgctcttcggtgcatttgatcagcgcgctcagccggtcggcggctttgagcagccggtgctcctctgccgtcagggcgctgccgtccatgcagggggtcaattctgcggccagttctgcgggcagcagggctgccatggagcgcacgctctcggtctccagcgccttgtaggcgtcccgcagcgccgcggagtggtacttgaccggcgtgggcatatccccggtaatgatctccggtgcgtcgtggtacagcgccgccaccgccaccacctcggggcggcagggcgtgccggtgtagtgtttggcaatcaggcacagcaggtgcgccagcagcgcggtgtcgcaggtatgctcgctgagggattccgcccgggtggaatgcatcaggctccaccgggtaatatacttcatgcgcgccagtaaggcgctgaagggatacagcataacaatacgcctccttttcttcaccatacccgccgggcgcttggttgtcaagcccttttttcttgtacgccgccgtgctatactacaaggtgtcatcaaatccacttccgcgccggtgcgcggagaaagaggaacgctatggaaaagtttataaagccacggctgctcacaccaagcgggcagagccataaaaaattctggcaggcggtggggctgtgcgccctgacggcggccatcttctttttacccttctacctccttgacggtggttttttccactatgccggcgatttcaacagccagcagatcagcttttaccggtatatgaacggcttcgtcaagggcgcgggctacccggacagcgcctttgccggtgcgccgcgcaataccttttcgtgggcgactgaccttggcagcggggtgatgaacgcctactccttctacctgtacggctcgccgtttttctggctgtcggtgctgctgccgcaaagctggctgccctatatgatggtgccgctgctggtgctcaagttcggcgtggcgggcggcggtgcgtacctgtgcctgcgccgctacgtcaaaaatgcgaactacgcggtgctgggtgcctgtctgtacgcgctttccggctttgcggtgtacaacgtgttcttcaaccactttgtggatgtggtggcgctgtttccatacctgctctgggcgctggacgaagccatttatgaggatcgtcacggcctgttcgccttctgggtggcggtaaacctgctcaacaactatttcttctttgtgggacaggtaattttcctgtgcatctactttgtgtgcaagctgaccgccaaggacttccggctgaccgggcgcaagttcggccatctgttgtgggaaagcgtgctgggcgtagccatgggctgtctgctgctgttcccggcggtgctcagtctgctgcagaacccgcgcaccatcgacctttcctccgggtggggcttcctgacctactccaaggtgcagcagtatctggccatcctgctcagctggatcctaccgccggactccccttatcttacctcagtctggtcggagggcgtcatcaagtggacgagcatgacggcctatctgccgctgtgcagtctggccggtgccatggcctactggcgcagccggaaggcagacagcaaaaagcgcatcgtggcggtatgcgccgtatgcgcactggtgccggtgctgaacagtgccttctacgcgctcaactccagctactacgcccgctggtactatatgcccaccctcatccttgctgccatgaccgtgaacgcgctggaggacccggacgttgatctggatgcacccgcccggggcatcggctggatcatgctggctacgtttgtttttgcggtggtgcccgtgcgggacgataccaccgagacatggtcgctgggcgtgctgaaaaacccgggacagttctttgtcgtgctgggcttcggactgctggggcttatgctgtaccgcgttctttgcagcaagtggcggcaggacagccgctttgcccagcgcatgacggcggcggtgctggtgtttgcctgcgtgttcagcatggtacacatcggcatcggcaagttcgggcagtggtacaccgacagcgaccttgtggagcaggacactaacgccttgctgctgaaaaacgacctgccggagggcgactaccggatagacacctacaagatccacgacaacatcgggatgtggctggataaaagctgcctgcaatacttcggcagcacggctgcccccagcatcctcagcttctacccggcgctgggggtcaagcgggatgtgcgcagcgagccggagatcgcaaactacgcgttgcgcggccttttgagcgtggagtacctcatcaccactccggaaaagcgcgagagctttgaggacgaagcagacgcgggctggacctaccttgccgatgtggacggctacgcgctgtaccacaacgacaactatgtgcccatgggctttacctacgactactatgtgaccaaagctacctacgaagcttcggtcaagaccctgcgctccaacctgctgatgcgggcgctggtgctggaggacgaggatgtggcgcagtacggccagtacctgaccgagctgtcggacgccatgctggatgacctgcactacgacagctacacgcaggactgcgccgaccgccgcgcccacagctgctcggtgttccagatgaataatgccggtttccatgccgagatcacgctggataaggcaaacctcgtctttttctccgtgccctacgacgacggctttaccgcctacgtcaacggcgaaaaggccgatatccttcaggtggacgagggactgatggcagtgctctgcccggcgggtgcaagcagcatcgactttgtgtatcaggccgccgggctttccgccagccgggtggtcaccgccgtggcaattccggtgtgggtggtgtacgttgcctgctttgtgcgccgcaagcgccgcagcaccggcaccccggcagaagaatgactttgaccgggcagaaaaataaaaattttaaattccctcttgactttacgaagataaagtgtataatgcaatcaaaccgatgaggcggaagagaacctgcacagcgcatctgcagtgagcccggacagtgcaaacgggcgaaagcggggcagagattcgtgggccgccgagggccgggcaaacgggcagaagccctagtagctttggacggaagtctccgttataggacaggggagtgttggctctccgtgagtggctctgctgtattggatgcagagcaagcaaggtggcaccgcagaatcgtaatttaccgatcctgtccttgtggataacacacagggacagggtcgttttgttttaagacccgtcccgcaaagggagcgggtcttttgatttgccgcccgctccgggaaaggagttaccactatgaaaaacctgaacatgatctcccgccgcagcttcctgaaggccgctctggccgcttctgctgtttctgccatggcactgaccggctgcggcagtgctgcttccagcaccgtctccagtgcagcggtctcctcctccgcagcggcttccggcagcgccgctgccgctggcgagaccttcaaggtgggcatcgtcaactatgtggaccacgcttccctcaaccagatcgtagaatctgtggagagccgtctggatgccattggcaaggagaagggtgtcacctttgactacgccgattactatgccaacgcacaggccgaccagtccaacctgaaccagatcggtgcagaccttgtggctgacggcgtggacgtgatcgtggcagtggccacccccaccgccgctaccatgctggccgctgtggaggacaccgacatcccggtggtctactccgctgtgaccgaccccgccgccgcaggctttgacggcgaggagaacatcactggcacctccgatgccctgaacaccgacgccataatgaacctgatcgtggcggcaaaccccggcattgataccatcggtctgctgtatgacctgagtcaggattcctccacccaggccattgcggacgccaaggccttctgtgagaagaacggcatcaaggtggtggaaaagaacggcaccaccaccgccgaggtgcagatggctgccgaagcactggtcgccgctggggtcaaggccgtgttcacccccaccgacaacaccatcatgaccgccgagctttccatctatgagagcttcatcgaggccggtgtgcagcactacaccggtgccgacagctttgctttgaacggcgcactggtgggctacggcgtggactacgtccagctgggcgaagccaccgccgatatggtcagccagctgctgtgcgacggcaagacccccgcagacctgccctaccagacctttgataacggcagcgtcaccatcaacaccgagaccgccgaagcgctgggtctggatctggctgccctgaaggaagccttcaagccctactgcaccgaaatcaccgaggtgaccactgccgagaacttctcctgaaccccgctcagccagaacctgacggtttttgccggctctcccgcaagggagagcttttggcagttttaaggagggtgctctactgcgcaagggcagcgtcctcgccctctccgtcacctgcggtgacacctctcccaaagggagaggccttggcaaagagatgaagtttgcgtggactgccaagggctcccactttgggggagctggcaaatccgtaggatttgactgagagggcgagcccgtttacctttacgacccctcccgtgaaaagggaattcaaaaaaacataaaaggagcatacaccatgctggcgagtattttttccctcaacgttttgcagacagcgctggagctgggctgcatctacggactggtggcgttggcactgtttctgagctactccatcctgaatattgccgacctttccaccgacggctgctttacgctgggctgcgccgtggcctgtcaggtggcgctgaccggtcaccccatccttgcactggcggcagccatggctgcgggggtgtgctccggctttgtcaccgcctttttgcagacaaggctcggggtggaaagcattatggccggtatcattgtcaacaccggcctatacaccatcaatctggcagtgatgggcttctcctccaccatgtcgctggtcaagacccctaccatcttctccatggcaaaaacttcgctgggctttctgggcagctggtacaagctggcactggcggcgggcatcattgctgtagcctgcgcggcgatgctgggctttctgggcacgcggctgggtctttccatccgtgctaccggcgataacgccgccatggtgcgggcttccagcatcaaccctgcctttaccatcacggtgggtctgtgcgtgtccggtgcgctgtgtgcgctgtccggcgggctgctggcacagtaccagaaaagctgcgatatcaatgtgggcaccggcatggtgaccattgcactggcttccctcatcatcggcgagacgctggtgggcaagcgcaccatgctgcgccgcatctttggcgtggtgttcggcagctgtttgtaccgctttatcgtggccgtggcgctgcggttcaacgtgcccgccgcggccatgaagctggtttctgccatcattgtggcagtggccatctccatgcccgccatccgggagcacttcgcctttgaaaagcgccggcacgccgcccgtgcccgccgcaccgtgaccaacagggagggacagtaacatggaaatgctgcagctgaacgacctgcacaagacctttaaccccggcaccgtcaacgaaaaggtggcgcttgccggagtgagcctgcagatggaagccggagattttgccactattgtgggctccaacggcgcgggcaaatccaccctgttcaatgccattaccggcggctttatcgccgacgagggcagcattctgctgggcggacaggacatcacctttgcgccggagcaccagcgcagcaaggtcatcgggcatctgttccaggacccgctcaagggcaccgcgcccaacatgaccatcgaggaaaatctggcgctggcttacctgcgggcaggcactgcgcccaacgccatcttctcccgcatttcccgcaaggataaggcgcttttccgcgaaaagctggctttgctggacatgggtctggaggaccgcatgaagcagccggtagggctgctctccggcgggcagcggcaggcgcttaccctgcttatggctacccttgtcacccccaagctgctgctgctggacgagcacaccgccgcgctggaccccgccaccgccgaaaaggtgctggcgctgaccaagagcatcgtagccgagaaaaagatcacctgcctgatggtgacccacaatatgcatcaggcgctggagctgggcaaccgcaccctgatgatggatgctgggcgcatcgtgtttgacgtaaagggcgccgcgcgcagcaagatgaccgtggacgacctgctggaaaagttccgcgagaacgcgggcaaaaaccttgataacgaccgcatcctgctgagcaaggtggagaaataagaaaaggtctgctgcatcgtaccggtgcagcagacctttttacttttatttctttaccacaggcggatgaccttgatgacgccctcggctttatcgcgggccagctccagatggtgctgcagcgccatggctgcgccgtcccagttgtcagacagggcagcgtccagaatttgcaagtgctcctcgcaggtctgctcctgattgatcatgcttaccttgccggtcatgatgcggaagcgggtgttcaggccggtgatacggtcgtaggcagagcgcagatacttgttgggcagggtgctcatcagcagctcgtggaaatcgtcgtccgactcgcagaagtcctcgatgcgctcgctgtggtgcatcagctcggcataggcttccagctgctcgcgggggatggcattgccgtaagtacgcagagcgtatggctctaccagcagacgcatttcaaacatactgtgcacgtcctcttcggtgatgccggagaccatcagcccctttttgggcagaatggtgatcagcccctcctgttccagacgccccagcgcatcccgcataggggtgcggctgatgttgcccatctcggcgcagagcttctgctcattcaaaaactcgttggggcggtattcgcagttcaggatcttggttttgaggtactggtacgcctgcagcttcaggctgagctttgcctgtgcgtcctgctctttcataagcacattctcctattcttctttgtcttcttctccaaaaacgttccaaaacgtccgaaccggcagcgcaaacccaccgctgccagttcgcttcttcttcatgttcagccagcttgtatcccggctgcaatccaaccactttatctagtatattatttcacattagggcgttttttacaagacttttcgcttaactttggcgtgttttccgttttatacaaagattacgccccggttttgctactttttacaatgttttttgtgcttgtcgtcaaacagaccgactttttgccctcttcttttgcatccaagcgcaaactgtgctacaatagggctgaaaaacaacacatctacaccggaaaggaccgtatctctcatggcacgaagcgatggctacaacacccgcacccggcagctcatcttggattacctcatcaacaaccgccagcacgcagtaagcgcctccaacattctggagcatctggaggagcagggcgcaagccccaatcccaccaccgtgtaccgctatctggataagcttgcgggcgagcagcgcattatgaaatatgtggccgacaagggcgaacgggcggtgttccagtatgtggacgagggacgccactgccgggagcatctgcacctcaagtgcgtgcagtgcggacgcatctatcatctggactgccattttatggacgaggtgcgcgcccacctgatggcagagcacggttttaccctgcaatgcgagggcagcgtgctgtacgggctgtgccgtcattgcgcgcagaacgcggcaccgtccgcagcagaagaacagtctgcaaaaaaatgcgcctgctgtgttgacacagacaaaaacccgtgatacaatgcagacaataaaagcgttgaccgggaaaagtaagatttcacccttttcttacagagagtgcgggatgctggaaaccgcgcagaaaacgagacccgaagaacacccgtgagccgctccctgaacctgcggtgtgcagcagtaggggcagacgtgcgccgctcgttatcgcggcagtgctttcaacggggagagcgcacaaaagtgaccggcgtattgcgtatgccggtaatttaggtggcaccacggatacggcagcatattcgtcctaggactatgggatgaatgtgctgccgtatttttatttttatcgtttttacaagaggggtaagaagtatgtgttgtgttatgggttatacggggcatgatttgagtgccgaaaaattcaaagagtatctgctgcgcaccgtggaccgcgggccggacgaccagcgggtggtggagggtccctacggcctgatgggctttgggcggcttgccatcatgggactgaccccggaggggatgcagcccttttaccggggcgctgactgcgtggtgtgcaacggcgagctgtacggcttccggttcgaaaaggagatcttaaagcgccggggctacaagttctgctccgactgcgactgcgagatcctgctgccgctgtactacgagtacgggctggatatgttccgccacatggacgccgagtttgcgctgatcatgtacgattcccgcaaggatcggctcattgccgcccgcgaccccatcggcatccgtccgctgttctacggctactccaagtccagccacaagatcgccttctcctccgagatgcgcaacctcatcggctggtgcgatgatatccgtcccttccccatcggcagctactactgcgacggccgctttgtacgctacgaggacattgccgatgtgcccgcccccatgcaggacgatatgcccaccatcctgcagaacatccgcgagaagctgatcgctggtgtggaaaagcggctggatgccgatgcacccgtgggctttctgctttccggcgggctcgactcctccttggtgtgctccattgccgccaagaagctgggcaaacccatccgcacctttgccatcggcatggacaccgatgccatcgacctgaaatacgcccggcagactgcggactatctgggcagcgagcaccacgagatcatcatcaaccgcgagatggtgctcagcagcttggaggaagtcatccgcctgctgggcacatgggatatcaccactatccgcgccagcatgggaatgtacctgctgtgtaaggccatccatgagcagaccgatgtgcgtgtgctgctgaccggcgagatctcggacgagctgtttggctacaaatacaccgactacgcccccaccgccgatgccttccagcaggagagccagaagcgcatccgtgagctgtatatgtacgatgtgctgcgggcagaccgctgcatctcctccaacagcatcgaggcgcgcgtaccctttggcgatttggattttgtgcgctacgtcatggccatcgacccggaaaagaagctgaaccgctacggcaagggcaagtatctgctgcgcaaagcctttgagggcgactggctgccgccggagatcctgtggcgcgaaaaggccgctttctcggacgccgtaggccacagcatggtggacgacatcaaggagtatgccgagagcctgtacaccgacgaggagttccagatgcgccgggcaaactactcggcacattgtatgccctttaccaaggagagcttgttctaccgcgaaatttttgaaaagtactaccacgaccagagccgcaccatcgtgggcttctggatgcccaacaaggcatggccgggctgcaacgttaacgacccctctgcccgcgtgctggcaaactatggtgcttccggcgtgtaacgccagaccgttttatacagcggaaggaatattctatcttttgtaaaccgggaagatctgcggatttttccggtttactttttcgcgagagggttcagcctgctgagagcaacaaaaatctgccccacagcgcgattgtttccgcaggaaacgagcgcggcaactgccgtttgccatcgcgactcctcccgtgaaaatggaataccggaattataaatcgttgttcagcctgtgggcttacggaaacggcacttcccgcacatcatcggggtccagcccggccttgcgctgctcttcaaatacggcggcaatcagctcgtccaagtcctccaagtgggtcagggtgcagcagtagcggcgcagggcggctgcgcccttcagccccttcatgtagtgcatggtctgggcgcgtgcctgcggcatggccacaaactcgcccttctgctccaccatctcctccacctgacggcgcagcgcgttcatccgtgcctgcaggtttggctccttgggggcgggcaggccctccagcgcggcgttcacccgctcaaaaagccacgggtcgcccagtgcgccccgggcgatcatcacgccgtcgcagtttgtctggcgcaccatgcgcagcgcgtcctcggcgcagtggatatcgccgttgcccagcactggcacctttaccgcatcctttacccgggcgatgatctccgggtcgattcccggggtgtacatctgctcccgggtgcgggcgtgcactgccaccaacgccgcgcccgcctgctcgcaggctttggcacactccacggcggtgatgtggtcggcgtcccagcccttgcgcatttttacggtgaccgggcgcttggtgtgggccactacctgctccacgatgcgcccgcagcggtcggggtccagcatcagcttgctgcccgccccgccggaaacgatcttgggggcagggcagcccatattgatatccacaaagtcaaatgcgtactgctcgatggcggcggtggcctcacccatgatctccggcacctcgccgaagatctgcaccccgtagggtgcgccgttaggctctgccttcagcaggctgacggtcttgtggtcgccgtacaccagcgcccggctggacaccatctcgctgaccgtaaagcccgcgccgtgctgtgccatcaggcggcggcagggggcgtccgtaaagcccgccatagggccgaacaccgcccggtggggcagggtgatattgccgatcttcaaaggttccatgggttctccttgtatctgttttggggtagacgattttgaatgcgctccgcgttgctttgcgcatcatcagcggaattattattataatttcgcaattctggaaaatctgcggattttccagaattgccttttcacgggaggggtcgtgacggaaagcggcagctgctttcctgctatataccgtaaaaaggggctgttgcgccaaatgctgtgcaacagcccctgtggttttatgttacatcttctcaggcacgttgatcttgaacatggtgagcacgttgaagatggcgttcttcacgccgatgcacagggcaaggcgtgcctgctgcacggcggggtctgcgccctgaatgcggcagttgccgtagaagcggtggaaggcgcttgcaaggtcgatgacaaagcggttgatgcggctggggtcgtacttctcggcagccatcacgatctcctgcgggaaagcggccagcatacggatcagatccatctcggaaggttcggtgagcagggtggcgtcgatgttctccgcaccggcaaactgcacgccctcgctctccatcttcttcaaaatggagcagatgcgggcatgggcgtactgcacatagtatacggggttatcgttgtcggtcttgacggcctgatccagatcaaagtcgatgccgctgcctgcgtcgtgcatattgaacaggaagcgtgcgctgtcgatgggcacttcctccagcagatcggtcagggtgatggcattgccggtgcgcttggacatacggacaggctgaccatcccgcatcaggttgaccatctgcatcagcacaacgtccagatcctcgccgttcagaccgatggcatccatcgcgcccttcatgcgggccacatggccgtggtggtctgcgccccacacatcgatggccttggcaaagccgcgggtggccagcttgttgtagtggtaggcgatatcggcggcaaagtaagtggggatgccgttggcacggacgagcacctcgtccttggcttcttcctcggtgccgtcttcggtctttttcttgttcacggtgccgtacttggcagcgtactgggcgctgcggtacatgatggcgccgtcctcggccttgtagcaggcacccagttccagcagcttgtccaccacagccagaactgcgccggactcgtgcagggtgctctcgtggaaccagacatcgtagtcgatgcggtacttgccgaggtcacgcttcagggcagcgatgttcttgggcagggcgtaggccaccagtgcgtccttcaaagcggcaaaggcctcgctctcaaacagagcttcctcgctcagcccggagcaggcggcaacgtacttgtcaccgttcagctcggcaaactcaccggccagcaccttgatgtcgccgccctgatagcactccttgggcaggggataggcttcctcgccgcagaactgctgcaggtagcgcaccgccagacttttgccgaacttctggatctggttgccggcatcgttgatatagaactcgcgggtcacatcgtagccggaccagtccagcacagcggccagacagtcgcccagtgcgccgccgcgggcgttgcccatgtgcatggggccggtggggttggcagaaacgaactccacgttgtactttgcgcccttgccgtggtcggtgcggccatactccttgttggcgcaggcacccagcaccacgcctgcccagaagctctgggacaggaacaggttgatgaagccgggaccggcaacctccaccttggagaacacactgttttcgatggaaggcagatgtgccagcagggcgtctgcgatcatcttgggtgccttgcgccaagtgcgtgcaccggccatggcgaggttggaggcgatgtcgccgttcttcacgtcggcggggatctccacgataaaggcgggcagctctgcctcgggcagggtgccgtctgccatagcagccttggcggctgcggtcagcagagcgcgtgcctcgtccagcgcagcctgccgggggttgtagttctggtaggtcttttcaaaatcagtcatgggtcggattcctttcacagtctcagggaacttcatcaattcacatgggtcacggtaacttccagacggttgcggctcaccagctcggcgctgtcggcatccagcaggtaggcaaaccgggcggtgccgcccttttcggtcagctgacagtcgatctcgtccgcggtcacgcccaaggtcatagagccgaagccggtctcatagtggcacaggttgcggcggcctttttcgatcagcagctgggtgccggccccgccgcccttgccgaaccgcagcatcgctacccggctgccgtctgcggcgatcttcagggtggtggtgcagccctcgtagccggtggtctcggtctcgcggtaggtcacatagtagctgccgcccttcagcacaaaactgccccgggtcatcagctccacaaactcttctttttcttcctccgcagccggttcgtccagccgctgctcaatgcggcttttgatgcggatgatatagtcttccttcagtggcttgctcacgttgtatttccttatcaatatttatcaatggcgatctgttccaccgggccgcctttgtactcacccagaaacaggtctgccgtctgcacaaagctgtccggcacatcgctgacgtaaaagtgcgcctgcccattctcgtggctggcgcgcagcccgcgctcggcaagcatccgctccagatgatgggcggcggtcatggcagggtccaccagcgtgacgcccgggcccataaactccccgatcatgcttttcagcagcgggtagtgggtgcagcccaagatcagggtgtccaccccggcttcgcgcacctcggtcaggtactgggcaatgaccagcttcgtgacctgctgctttccggtctcgctgtgatccacatacccggcctccaccagcggtacgaacagcgggcaggggcgggcagtgatctccaccccgggcaccagctgccgcagcagcttttcgtagctgcgggagcggatggtggcggctgtgccaatgacgccgatgcggcggttgcgggtgacaaaggctgcttcccgggcggcggcatccactacgccaaggtagggcaccggcagctgggctgcttccgcagccgggtaggtgctgctcaccgtaccgcaggccgccatgatgcacttgacgtttttggaaagcagaaaggccacgtcctgccgggcgtactgcagaatggtctccgggctgcggctgccgtagggcacccgaccggtatcgccgaagtagatgatatcctcatggggcaggcgcttgcgcagctcccgcacgccggtcagaccgcccagaccgctgtcaaacacaccgatggggcgattatccatgctgcttttccgtcctttccaccgccagtgcgatcaggcggtcgatgagctgcggcaccggcagaccctcgtgctccatgagcttggggtacatactgatagcggtaaagccggggaaggtgttgatctcgttgatgagcacccggccggtgttcttttccacaaagaaatcgcaccgtgccagaccttcgcagttcagtgcggtgtaggccatggcagcgtaggtctttacctcgtccagcttggcttccggcagatgtgccgggatgacggtctggctcacgccgttcttgtacttatcatcataggtgtagaactctgcaccggcaaggatctcaccgggacgggtggcaacagcgggatcagagccgatgacggcgcactccacttcctgtccgtccacaaaggcttcaaataccaccttgcggtcgttttccagcgcaagggcgatggcagccttcagctcctcctgactggacaccttggagatgcccacactggagcctgcgttggcgggcttgacgaataccggccagcccagcttttcttcaacgccggcgcacacgccctccagatccttctcgatctcccagcggttggcagccacccacttggtgtggggcacaccgttggcttcaaacagggcgttggccacagctttgtccatgcacacggagcttgccagcacgccgcagcccacataggcgatgcctgccagctccagcaggccctgcacggtgccgtcctcgccccacaggccgtggagcaccgggatcaccacgtcaaggtgcatcttttccacccgaccgtccggggtgaacaggatcatgccgtggtcggcgcggtccgggctgatcacgcagggcatattgccgggcagctcttcccagctgccgtcggccatctgctccgccgtggcctcggtgtagagccagcggccctccttggtgatgcccacggtgagcacctcgtatttgctgcggtcgatgttgcggacaaagttgcccacagagacacggctgacctcatgttcgctggacataccgccaaacaacagcgccacgcacattttatttgcagactgcatgatatctcactcctatttataaagccccggtaaaggggcggcttcaaaccggtaaaatgccgtttcgattcattatacaatatctacgcccgcgatgcaagcagaatgcaaaaaagccgctttgggacaaaaagacacagactgcaaaaaaagtttctcaaaatcgcttttttctgcttgacggattgaaaaacgcgtggtacaatgatatcacctcttttgcggggttattaagtgcgcctgtttttacagctgccacccgcacccgagggaggttcaaaacaaccgttataatggaggtgtcaacaaatgaccgttaaaatcactctggcctgcaccgagtgcaagcagcgcaactacaacaccacgaagaacaagaagaacaaccccgatcgtctcgagatgaagaagtattgccgtttctgcaagaagcacaccgttcatcgcgaaaccaagtaaaagaaaggcggagcataatggcagacaaaaccgagaaaaagccgggctttgtggccaaagctaaagccgctgtgaagggcttctgcgcacgggtcgcaaagttcttccgcgataccaagagcgagctgaagaaggtggtctggccgtccaagcaggacgtcaagaccaacaccatcgtcgtgcttgtgaccgtcgctattgcagcggttgtgatgatcctgctggatgccatctttggtggtattctgggcctgatcatcggcgcctgagaatcatcttgaaacggagggtcaaccaaaatggaagaatcaaccaagctggtagatgagtccactgaggctctttggtatgttgtgcatacctattccggttacgagaacaaggtcgccaacgacctgcagaccatggtggagaaccgtcacctgcaggagctgatctgcgacatcaaggttcccgtcgagatggttcctgagatcgacaagaacggtaagcagaagatggtggagcacaagctgttccccggctacgttctggtcaaaatggtgatgaacgacgatacttggtatgtcgtgcgcaatacgcgcggctgcaccggcttcgtcggccccgcctccaagcccgttccgctgaccgctgaggaagtggagaagatgggcgtggagaaggctgcaccgctcagcgtcgattttgctgtcggcgataccgtgcagatcaccgccggtcctctggaaggctttatgggccttgtggaagagatcgacaccgagagcttcaaggtaaagctcaaggtcaatatgttcggccgcgagacccccgcagaggtggagatcggtcaggtcgagctgccgtaaccaaccggcaagttccgtttaccaaggtaagaccgcagtgcggttcttatagagcgtgtgcagcgtgcacgcgctcgtgggaggcgcagagacactgcgccgcaactcaccacagatttttggaggtgcatttatcatggcacagaaagttactggctacattaagctgcagatcgaggccggcaaggcgactccggctccccctgttggccctgctctgggtcagaagggcgtcaacatcatggcgttcaccaaggagttcaacgagcgtaccaagaaccagatgggttatgtgatccccgtcgtcatcaccgtgtacgctgaccgctccttcagcttcatcaccaagactcctccggcagctgttctgatcaagaaggccgctggcatcaacaccgcttccggcaagcccaacaaggaaaaggttgcttctctgaccgccgctcaggtggaggagatcgccaagaccaagatgcccgacctgaacgctgcttctctggaagctgcctgcagcatggttcgcggcacctgccgttccatgggcgtcaccgtcgagggctgagacataaacagtgggagggcataacactgcccgcatgaccacacaggaggatatacaatgaaacatggcaagcactatgtcgacgctgcaaagctggtcgattctactaaggcatacgatgtgaacgaggctctggagctggcttgcaagaccgcttccgccaagttcgacgagactgtcgagctgcacgtccgtctgggcgttgatggccgtcacgctgaccagcaggtccgcggcgctgtcgttctgcccaacggcaccggcaagaccgtccgcgtctgcgccattgctaagggccccgcagctgctgctgccgaggctgctggcgctgatatcgttggcgatgacgagctgatcgcaaagatcgccggcggcttcatggattttgacgtcgtcgtgaccacccccgatatgatgggccgcgttggccgtctgggtaaagttctgggcccccgcggcctgatgcccaaccccaaggccggcactgtggctcccgatctgggcaaggctgtcagcgaggctaaggctggtaagatcgagtaccgtctggacaagcagaacatcatccatgtgcccgtgggcaaggcttctttcggtgcagagaagctgtacaccaacctggacactgtgatggaggctattgccaaggcaaagcccgctgcagcaaagggtacctacttcaagagcgctaccatcgccaccaccatgggccctggcatccgtctgaacaccctgaagtacggtgtctaatttgaatttctgatatttttctgccgttctgcggaatggcagaaaaattttgtcagaaattgaaaaaagtacttgacaacgccgcacgtttgcggtattataatcatgctgtttttaagacagcaggcgctggagtccagtgtaaagtttgaccgcctgccgagaaacgtgcgtaaagttgctttatgcctctctctcggcgcagtgcgcgggagagaggcttttttcattgctccggctttcgatacaagtttttgaaacgaggtgaaaccgaatgcccagtgcaaagattctttctgaaaagcaggcttacgtcgctgatctgaaggcaaagtttgagagtgcggtttccggctgcgtcgtcgcttacggcggcattaacgtcgagaacgacaccaagctccgtaaggagctgcgtgaggcaggcgttgattacatggtcgtgaagaacaccatgctgcgtctggcagttaagggtaccgctctggagggtctggctgagaacttcaagggcgacaccgctgtcgcttttgctcacgaagaggatcccatggctgctgcccgcatcctgtgcaagtatcaggatggcgataagtccaagaagtttgtcgtgaaggctggcttcatggaaggcaaggctatgaacgccgccgagaccaacgctatcgcaaagctgcccaaccgcgaaggtatgctgtccatgtttgcaggcgccctcaccagcaccctgtctggtctggccgttgcaatgcaggcttatgccgacaagcaggaggagcccgctgcctaatggctgcgtgaccgccgcttaacaagaaactgaaacaaactaaaaccattgatattggagggttattaccatggcttctgagaagattactgccatcatcgagtccgtcaagggcctgaccgttctggagctgaaggaactgatcgacacctactgcgaggagttcggtgtttctgctgttgctgctgctgctcccgctgctgctggcgctgctgctgccgctgaggaagagaagaccgagttcgacgtcatcctggctgaggctggcgctaccaagatgcaggtcatcaaggttgttaaggagatcaccggtctgggcctgaaggaggctaaggctatcgttgatggcgctcctaaggctgtcaaggagaaggtctcccaggctgaggctgacgacatcaagaagaagctggaagaggctggcgctaaggttgaggttaagtaatttaaccccttctcttaccgttctttcttgaacatcaagaggtctgcaccgcaaggtgcaggcttctttttgctataccccctcagtctgctcactgcgttcgcagcaagcttgccgcctgactccctcagtcaaagcctgacggctttgccagctccctcggagagggagcctctggcgtagccgcaaactttgcactttgaccggaaactgtaccgctatgccaaaggcccctcccgtgaaaaaaggcttcagaaacgcctgcgggcgtttctgaagcctaataataaaaatccaattccgctgaatatgcccaaagcaaagcggaggacattcccgatcgttctcttatcaaaaaaggctgccgcacaaacctgtgcagcagcctttcgtgttattcctccggtgcagccttgcactcctcaacataggctgcaatcttgtcgatctggatctgtgccacggcacggccggtctcgtaaacgcggcgcagctgggcggggtcgcgctccatagagggaatctccagcgggatgggcgggcggatgacgaatgcccggccggactgctccagcatggaaatataggccagcgtctcattgtagcgctggtgccggtctgccacggcctccacaaaagcgggatagcgcacataccttgcccggataaggggcagcatcttgtttttctgctttacaaaacccttgggctgggtcaggatgatcagattgcgcttgtagccgatggactcgaaaaagcgcacaggaatggaatctgccacaccgccgtccaacagctgatagtggccgatctttacgatctttgccgccagcggcatggatgccgatgcctgcatccaccggatgtcctcggcgtcgccggtgcggcacttgtggtagatgggctcgccggtgcgcacatcggtgcacaccacaaaaaagtccatggggttctcccggaaagccttggtgtcaaaagggtccagcttttccggcacggtatggtagcagaactgctcgctgtacaggttgccggtgcgcagcaggttaccaaagccggcgtagcgcttgtcattgcagtattccgtgttgtagcggatggtgcgcccgatctggtgcgacttgtagttgcagccgaacactgcccccgccgacacgccaatggcaccgtccagctggatgttatgctccatcagcacatccagtacgccagcggtgaacattccacgcatggcgccgccttccagcacaagtcctgttttcataccattttcctcctcgtccggtcaaaaatcccggatattacccttctcctacaagaatagtatactcgaaaaccgcgaaagaacaagggaggataaaccaaaaatgacccgacaacctcgcgaagtttcggtatttttggataagatcatacttttagaaaaaacgaagaggtttggtgccgtatttttacgaattttggcaagaaaaccccttgtcaaagcgggatgcttccggtatactaggtgaaacattatatgatgggtgcgtgtggcgcgcgcccgggaatggaaaacaggcgggcgcttttcgcggcgggcgagccggagacagaaaacgcacctgcaagggttggaggatatactttatgaagatgctggaagatcgtatccgcaaggacggcattgtgcgcgaaggcaacgtgctcaaggtggacagctttatcaaccaccagatggacatcccgctgttccgcgagatggcacgggagtggaagcgcctgtttgcgggcaagcccatcaacaaggtgctcaccatcgaagccagcggcatcggcattgcggctgtggtggccagcgagctgaacgtgccggtggtgtttgccaaaaaatccatgagcatcaatctggactacgataattacaagactcagatccagtccttcacccacaaaaagatctacaacgtcatcgtctctaaaaagttcctcaccccggaggatcacgtgctgatcatcgacgattttctggccaacggctgcgccctgatgggtctgctggagctggccgaggaagccggtgccaccgtagagggcatcggcatcgccgtggaaaagggcttccagcagggcggcgagctgatccgcagcaagggcatccagctggagagccttgccatcgtggacgccatggacagcaccaccggcgagatcaccttccgcccccagccgaaccagaactaaatcgatttttcaaaggctgctgcacaggcactgtgcagcagccttttttctttctacgccccatcaaagctgtctccatcggcgggcagggcagcggcttgcgcgtctgcgctgccggtgtccgctgcccgggggacgcccttgtacaccagcgtctgctccagcacttcggcgcagaccggtgctgaaagactgccgccggcggtggtccagctgtggggctcatccagacagaccagacacaaaaactgcgggtcatcgatgggggataccgccacaaagctggcaatacgggccttctcgtcggcgctgtccagcttctggctggtgccgcttttgccgcccacccggtagcccgcgatctgtgcgttgcgtccgccgccgtacagcaccaccgcctccatcatctcccgcatggcggcggaggtggcgggctggatcacctgccgcttgcacaccggggcattgtgctgcaaaacgctgccgtccggcgctaggatgtccgataccagatacggctgcatcagacgcccgccgtttaccaccgcgcagacggcagtagccatttccagataggaaattttgctgctctgcccgaaggcacaggacgccagctctaccggccccatgcggtcggcggtgtagtacaggctctttttcggctcggcgggcaggtcgatgccggtgggctcccgtaggccgaaagcggcaaaataatcgcagaaagcctgcttgcccagccgcgccccgatctggatgaagctctgattgcaggagttttccagcgcttgggtcacggtctggctgccgtggcgtttgtggttggcgcagtggaaccgcgtgcccgccactgagatggagtctccgcagtaaaaggtggagtgccgggtgatggcaccggcatccagcgccgccgcgcaggtgatgagtttgaacacactgcccggctcgtataagtcgctcaccgccttgttgcgccactgggtctgctgcgccagctgcagggcggcggcgcgttctttaccggaaagggcgtccacggcggcgcgtgcggctttgtcggcgatcacccggggctggttggggtcgtaggccggggtggtggccatggccagcactgccccggtgttcacctccatcacgatgcccacgctgcgggcggctacatgatgctcctgcaccgcataattcaacgcattttcaaggtaatgttgaatatttgcatcgatggtcagccgcagcccgctgccctccacgggcgtaagttccgtctcgtagctctgcgccagcgtgtagccccaagcattcaccgcagtcagcaccaccccattctgcccggtaagggtgtcgttatatttcagctccagtccgctgaccccggcattgtccacgttggtgaaccccagcaccgaggccagcagctccccctgcgggtaccagcgcttggagtcctgattgatgcgcacgccggtaatgccgttttccgcgcagaaatcccgcactgcatcagcaatttcccgctccacccggtagcgcagaaggcaatcgttggagcgccggtcgctgaacttttccagcagttttgtttcgtccaattccagtatctccgcaagccctttggcggcaagggcaagcttctcctccggcatctcccgggggctggcgcgcagggtccagcagctgctgttggcagcaagcagcgcaccatcggcgctgtatattttgccccggtcagcgggcacaacggtgtcccgcagctgctgtcccagcgcccgctgggtgtaccagccgccggtgcacaattgcagccagaacagtcgcccgatgagccctgcaaagcagacggcgcacagccccaccgcaatgagccgcgcccgcagacggaacgcccgctccggtaaagtgcgcagggcgtccgtgggttttgagccgcgcatggcagcaccccctttgcgggcagtttatgcgcccggcagcagcgtgtatgactaaccacccccgcacccgcgtacaataacagaaacggaggtgaccgggattgcacagaactgctgcccgcaaagggctgctgcggccgctgccgcccatggatctgccctttctggtgctggtgctcacgctggtagcctttgggctggtgatgctgtgcagcgccagcagcgcggtggcactgtaccggcggcaggacgcctttgcctatgtgcggccgcagctgctgtacgccgccatgggtctggcggcgatgtggatggccagccgggtggactaccacatctatcacaaactggcgtggccgctgctggcgctctcgctggtgctgctgacggcggtgctgttcatgccggagtataacggctgtaagcgctggctggtgctgccggggctgggcacattacagcccagcgagatcgccaaatttgcggtggtgctggtatttgcccatatcatcgccctgaaccacgaccgcatgggcagctttgcggtgggggtagtaccctttgcgctggtgctgggggtggtggcagtgctcatgctgctggaaccccacctttccggcacggtgctgatcttgagcatcggcgcggtgctcatgttcgtgggcggcaccgggctgcggtggtttttgctggcgggggcgggcggcgctgccgccatcggcacggccatcgtgctcatgccggagctggtgccctatgccgccgaccggctcaactcttggctcgacccctttgccgacccgctgggcgacggacaccagaccatccagagcctatatgccatcggctccggcggggcggcagggctggggctgggcaacagccgtcagaaacatctgttcgtgcccgagccgcagaacgacttcatcttttccatcctctgcgaggaactgggctttctgggcgcgtgtgcggtcattctgctgttcagtgcgctgctgtggcggggcatcacgctggcggcgcacgcgccggaccgcttcggggcactgctggtggtgggttttgtggtgcaggtggcgctgcaggcggtgctgaatattgcggtagttactaacaccatcccaaacaccggcatcagcctgccctttttctcctccggcggcaccagcctgatgatgcttctgggcgagatgggcatcgtgctctccgtctcccggggcgaaagctgatatagaccggcatttccagccgcaaaggggaaatatcggtgcaggaaagccgaaaaaagcggacaaatgaccggacaaatcccgcagacagcggaaaagccgtttccggcgcatttctttgaccaaagaccctcgttttgcataccatggggtatcttttgcagaacgggggtcttggcatggctggggattggatcattacgggtggacggcctttgcagggcagggtggaagtgcctgcggccaaaaacagtgtgctgccgttgctggcagcagcactgctgtgcagcgggccggtgcggctgcaaaatgtgccccgcctgaccgacgtggaggactgtcttgccctgctgcggggcgtgggctgcacggcgggctggcagggcgcagcgctggcggtgcagggacagcccatgcgcaccgaccttgcaccggaggccgcaggccggatgcgggcatccatcctgttctgcgccccgctgctggcgcggctggggcgggtgagcaccgtgctgcccggagggtgccgcatcggggcaaggcccatcgatctgcatttgcaggggctggcgcagatgggcgtgcggcagctgcccgttgcgcccggacagcttacgctttacgccccggcggggctgcggggcgcggagatctgtctagcttttcccagcgtgggcgctaccgaaacgctgctgctggccgctgccacagcgcaggggcagaccgtgctgcatggtgccgcaaaggaaccggagatcgcggatcttgccgccttcctcaacgcctgcggcggctgcgtggagggtgcgggcaccgacaccatccgggtgcagggaaggcgctgccttgcgggctgcacctttgcgccgatggcagaccgcatcatcgcctccacactggcctgcgcagtggcagcggcgggcggccgggtggaactggcgggctgcgcacccgggctgtatgcgccgctgctggaaattctggaacaaatgggctgcaccgtagagcgggcaaacggtgctgccgccatttcacggttcggggcgctgcgcggcgcgggaaatgtgcacaccgcaccctatcccggtcttgccacggacgccgccccgctgctggcggcggtgatgctctgcgcacagggcgaaagcagcctgcaggacagggtgtttgaaaaccgttttgcctgtgccgggggctttgcggcgctgggggctaacgtccgggtggcagagcgcacgttgtatgtgcagcctgccggggcgctgcacggggcaaagctgaccgcaccggacctgcgcggcggggcggcgctggtgattgcggcgctggctgcccggggcagcagccgccttagcgggacagaatttatccggcgcgggtatgcggagcttgaccggcttttggcggggctgggcgcacagatttggcaggaaattcccgcccggaaagggcttgcgaaaaaaacacccatgaaaaagcaattttgtcttgcaatcggagcgaaaaaatgatacgatacagttatataagtatcgtatgatagtttctgtgcggcttttgcgcagttccacataaaaatccgatggaggacaaagttatggcattgatgctcgacgaagaactggacgaaaacgttacgacgatcaaagtgatcggtgtaggcggcggcggcggcaacgccgtgaaccgcatggtgagcgacggcctgcagggcgtggagttcatcgccatgaataccgaccagcaggcactggccaagaaccatgcctcggtcaaggtgcagctgggttccaagctgaccaagggtcgcggtgcgggtgcagacccggagatcggccagcgcgccgctgaagaaagcaaggacgagatcgccaatgccctcaagggctcccagatggtctttatcactgccggtatgggcggcggcaccggcaccggtgcagcacccgttgtggccgaggtggcacatgatctgggcatcctgactgttggcatcgttaccaagcccttctcctttgagggcaagcgcaagatgggtctggccgagcagggcattgccaacctgctgatgcacgttgacagcctgatcgtcatccccaacgagcgcctgaagatgatcagtcaggaaaagatcaccctgatgaatgcctttcaggctgccgacaacgtgctgcgtcagggcgttgagtccatctctgccctgatcaacgtgcccgccttcatcaatctggacttcgccgatgtgcgctccatcatgaaggatgccggctacgcccacatgggcgtgggcagcgccaagggtgcaggcaaggccgagaacgccgccaaggctgctatctccagcccgctgctggagaccagcattgccggtgcacacggcgttatcatcaacatcacttccagcccggacatcggtctggaggacgtggagaccgccgcaggtcttatcacccagagcgcacatcccgatgcaaacatcatctggggtactgcatttgatgagaacctgtccgatgagatgcgcgtgaccgttgtggccaccggtttcgacaacaagagcgccagcgacctgcgcaacagcatcaacaacgccatgggcggtgcacagtctgtgccgtctgcggtgttcagcagcgacaccggtgcagcagcagccccggcaggcaataccgccccggctgctgctccggctgaaaagaaggccgtggaggaggaaagcagcgacaaccgttactacgatgagctgctggccatcctgaacaagcgtaagtaagatcaggctacaatggggctggcagctgcgcccatgcggtcagcgccggttccatgcaaggtgtgcatgggagggcatcatggtgcagacagagcgggagaccggtgccttgcgcggacaatttgcccggcaggtcactgtacaggcatctgccgcagctcaggcggaaagcgcccgggcgcaggcagagcagctgagccgcaagctggctgcggcacgcgctgaggtgcgccggtatcagacccggatgttcgcctttgagcgcactctgcttgccctcaagcacgataatgcagagctggagaccgcctgcgagcaggcgcgggagcagctggaacaggccaatgcccgggcagaacaggctgaagccgcctgccgcagagccgaagctgcccttgtagccatacagcagactgccccggaaacacccgcacagccggatacaacccccgagactgtgccgcagtgcgaagcggtggaggaacagcctgcgccggaaacggaagaactgctctgcgccccggaacaggcactgcccccggagcccgcacagcctgcatggcagccggagacccggctggagcagatggccgcggagctgatgggctggttcgatgccatgatgccccaagagtgaacctagaaaggactgctgcgtgttttgcgcagcagtcctttttctttctgcgtgggacgatttaaaatgcgctccgctttgctttgcgcatcatcagcggaaataaggtttatatttcgcggttgccgcgctctgcggagcgctgcaaccgcattttcacaggaagggctgtaacgacaaacggcttgctttcgaacaacgtttgcaaagggtactgtaaaaattggattgcatttatacagccgggaatgagaacgtttgcagaaaataccggaaaatggcagaaatgcggcgcttagtcttgcattttaatgtaaaatccattaaagtataaatgaatgtaaaaaagcggatgccgggcgtaagtccgctgcatccggtcggtgcgaacagcgtgcccgaagcggaacagcggcagaaggagagacatggccatgaacgagaaaccgaagatcctgatcacggatgattccgagatcaaccgtgccctgctcaaggagatactgggcgatggctatgactatctggaagccgaggacggcgcagcggcggtggagctgatgcggcagcgtacggatatctctctgctgctgctggatctgatgatgccgggcatggatggctttgacgtgctgcgggtgatgaagtaccacgcatggctggacgagatcccggtcatcgtcatttcggcgacagaggacaccgccagcattgagcgcgcctacgatctgggcgtaacggactacatccgccgccctttcgagcgcatcatgatcctgcgccgggtgaagaatgtcctcatgctgtacgctaagcaaaagcggctcacccgccttgtcactgatcaggtgtacgaaaaagagcacaacagcgtgctgatgatcagcatcctgagccatgtggtggagttccgcaacagcgaaagcgggcttcatgtcctgcacatccgcactctgaccgacctgcttttgcaccggctggtgcaaaagaccgaccgctatcagctggacgaaagcgatatcgcccgcatcagcacggcctcggcactgcatgatatcggcaagatcgtcatcccggaggagatcctgaacaagcccggacgcctgaccgccgaagagtttgccattatcaagaaccataccgtggcgggtgcgcagatgctgcaggatctgggacaggctattgcgcaggacgagccgcttttgcaggtggcgcacgctatctgccgctggcaccatgagcgctgggacggtaatggctaccccgaccggctgaaaggggacgagatccccattgcggcgcaggtggtggcgctggcagacgtgtacgacgccctgaccagcgagcgctgctataagcacgcctacgaccacgacaccgcgctgcgcatgatattgaacggcgagtgcggtgccttcaacccgctgctgctggattgcctgcaggagtcctcggagcagctgcgtgccgagctgaacctctcggagtgggaccggggcttccggcaggagacctaccgcctttccgaggagatcctgcaccgggaggcgctgccccgggagaaccacgctcagctgctgctggagcaggaaaaagagcgcacggatttctacgccgcccagtgcggcggcatccggttcgactacgacctgctggctggcagcgtgacggtgtatgactaccacgccgagccgatgcagcaaaaaacggtaacggattttgcacagggcaggggacttggctttttgaacgagcaggatcggcgcaagctttccaaggccataagccgcgccacgccggaagcgccggacgtggtgctgccggtcatggtgcagcgagatgggaagccacacctgcaccggatggcgctgcatactatctggagcggtgccggggtgcgccgctgcgtgaacgtgctggggcagctcaccgacgagcagcaccgcgtggagcatcaggccgaactgctgaccgcacttgacccggaagaggaccctgcccacttcctgcggcggctgcagggcatctttgacgtggtgcgtctggtagacccggggcaccgcaaggtgcttacgctggacagtgacggcatcctgactgaaaagcccggcagctgccacatggtatggaaccgggatacccggtgcgagaactgcatctcggccaaagcctacgcccgcaagaccatcctgaataagatcgagttcaaggacgaggaagcctactttgtcatctccaagtacatcgaggtaggcggcaggggctgtatgctggaaatggtcacccggctgacggatggccgctggctggacatgggcggccaccggctgctgctggaccgctgcgacggaatggagcgcagcgccttcgtagaccccctgaccggggcctacacccgccgctattttgataagttccttgccagcggcgagatgcacggcggtgtagccatgatcgacgtggatcagttcaaggcggtcaacgacagctttgggcatctggtgggagatgaagcactgaaaacggtggcggaagccatgcagaactgcctgcgccagaccgatatcctgatccgctacggcggcgatgaatttttgctgctgatgccccagagccgccccaacggggtggaaagcgtcatccggcgtgtgcaggacgccgtgcaggcggcacgggtgcccagccacccggagctccggctttcggtaagcattggcggggtatgcgacgtgcagcccctgaccgaagccatccgtcaggcggacgtccggatgtaccgcaataaggaaaacggataacaaaaagcgttgcacaaaacactgtgcaacgcttttttgttctctagcgcatattactggtgcggtgctccatcaggtaggtagcctgcaggtctgcgatgtgcagcttgaccgccagcgggtacttgtcgtaggcttccgagatggcaaagcagccgccccgggcagcatcatcaaagccgcccatgtgccagcggatggcaactgcttcttccaccttcagcttcatgaaccgctcgatgaggaacacgctcttttcgccgtgaccgtaggggaaaaggtcgtccacactgtaaaaaggcgctttctcccactgtccggtggcttcgttcttcacgttgcgggtgcccagcttgtaatagttggccttgcacagatcgtgcagcagggcacagatggcgtagctctcctcgctttcaccctcggcgaaaaagctgtcgtgcagcgcatggtagacgttcaggctgtgcatacacagcccgccctcacaggccccgtgaaaacgggtggacgccggtgcggtgaaaaaatccgtctttttgtccagccagtccagcagcttttcgctgcccggacgggtgacgtgctgctgccagatgtccagaaactctgcgcggtcgcccccgctcacagctccatatcctccagaatgcccttgaggatggccagctcgtcgtggctcagggagatacccttgcccatgcgggtgccgtccggggaccagtcgcggatgtcgtacttgggctcgccgtcgttccagctgataaggttcagctggcgctcccagccgcggggacgctggctcagcacggctacacgctggacaacttcgtatttgatctctgccatattgcaaaacctgcctttatgtttgtatgctaccataataagggaagtgcggcgagatttcaacaggtaaactgaaatattttaaaaaatttttgttgcgctcagccgtaaggggcgtcctcgcgccattccaccagctccaaaacggcggcggtgtcctcgtccggggcagggtgacggctgtgcagcttttgctttgtactgaacagcccgggcgcgtagtgcgccatcacgctggtctgcacgtccccggccagaaaggcggcggcgtttttctggcggcaggccacgggggtgccgtctgtcatggggacgccgggcttttccggctgcggcagctccggcgggggcagctgagcgccgggtgtgtccggcgcagccgggggctgcaggggcatactgcccagcggcggggcgatgcgggtgctgtttgcctgcggggcggcagcggtgccgggctggttttccagttcgtgtcggatgaagggctccagagagttcatcaaaatcacctccgcccctagtgtgccccgccagaagcgttttacacccgcagctctacggtggagccgccggtgcgggctttgtgcaccaccacctgccggtcgatgcggtccttgagcgcccccacatgggagatgatgcccaccagccggtcgccctcggtcaggccggaaagcacccggatggccagctccagcgattcctcgtccagcgagccaaagccctcgtccaggaacaaagtatccagccggatgcccccggcgctgctctgtacctcgtccgaaaggccaagtgccagcgccagcgaagccttgaagctctcgccgccggaaagggtctttacgctgcggcgggtgccgttgtagtggtcgataacgccaaggtccagcccggactggctgcgctggttctctgcaccgatgcgctccagctcgtactgcccggcggtcatctgcatcagccgggtgttggcgtagcgcagaatgcggtccagatagttcatctgaatgtaggcttccagtttgatcttctgcttgctggtcagggtgccgcccgccgtagcagccagcgcgctgacccattgccatcggctttccagcgtctgccgcgcttcggcggcagcgcggtactgcgccgccgttttgcggttgggcagcaattgtgccgaaagctgcttttcccggctgcgcaaagtctcccgcgcagcggtcagttcggtctgctgtgcggtaagttcctcggcgctgcgggcgggcagctccttttgggcggcggtttgctgtgcggtcagtgcatccacggcggcttcggcggcggcaacggtctgctcggcctgcttcaggcggcgctgtgccgtgtccatgccggtgcgcagggcactgcggtcggcttccagcttgtccagtgccgcctgcgcgtccgcgcgccgggggtagggcagggcggcgcgccgctctgcgatctgcccttccagcgcatctgcaccggcattctgggcggcggcgctgcggtcagcttcggcagcggcctgttccagcgccgggcgctggcgggtcttgttttgccggtcagcttccagctgtgccttgcggcggcagtcagcttcggcctgtcggcactgggcggcacagccggcctgtgccgtctgcaaagcggcggtttcctcggccagaacgttggtcatcagggcaaaggtgaggggcaccgtgccctccggggcagtaaagcgctccggcagcagggtctcggcatcccgccggagagagatctttgcttcgttggcagcggcaagggcgctctgggcggcagcgctggcagtctgtgcctgccggtcagccgcggcagcggactgccgtgcagcttccacctgcgcctgcgtgggcgcggtatggggcagcagggcgcgggcagggtgatgggtactgccgcacaccgggcagggtgcgccctcggtcaggctctcggccagcagtccggcctgtgcgtccaagaatgcccgttccagtgtattctgccgggcacgggcttcatcctgtgcggcggcagcggcgcggtagctctcctgcgccttgtgggcgcgtttggcctgatgctggcattccgcaaggcgctgttccagctttgtcagcgcttcgccgcgctgtgccagctgggtgctgtgggtttgcagcgccaaaagccgggtgtccgcgtctgccagtgcggaaagttcggtctcagcggcggcaagggcagtgttcaggctgtccagctgggtgcgccgcttttgtgcctgtgctgccgccagccgggcggcgtcccgcgcttcggtctgctggcggcagagggcgtccagcgcgtcataggccgcaagggcgctctgtgcctgcgtcacctgcgcggtgagggcatccagctgcgcagcgtccccggcgtggcggtcggcttcggcgcgggcagcgtccagtgcgggctttgcggcggcaagctctgcctgccgggcggtcagctgctgcgccagccgctgtgcctgtgcggctgcacccagctgccgctgtaccgtgtccagctgtgcttcggtggtttgcagggcggtgccggcttcttccagcgccgcagcctgccgtgcggtcagggcgtccagtaaagcaagcgccgtttccggcacggtctgggcgcacagggcgcgcagcgcctcggcgtctgggtcctccgggctgaattgcagcccgcccagcagactgtccagcttggcgttctgggcagtgcgctgctggttcagcgcggcggcttctgcctgcaaacgctcctgcagttgggcatagcgctgggtgcggaacagcttgcggaagatgcggctgcgctcctccgtagaagcgttgagcagctttgtgaactgcccctgcgcgatgagcacgatctgggaaaactggttgtagtccagcccgatgatctcctgcacggcggcggtcacgtcctttgccttggtcaccggcggacggtcgtccgggtaggtcagggtggcatccgccttttcggtggtcatgccctcgccccgggttttgggacgctggtactccgggttgcggcgcaccgtgtagcgcacgccgtgcacctcaaattccagttccacaaaggtgggggtcttgtcgtctgcgtacttgcagcgcagcatggagccctcccggatgccgctgctggaatgatcgtacagcgcgtaggtgatggcgtcaaaaatagtggtcttgcccgcgccggtgtcgccggtaatgagatacagcccgcctttgcccagcttttcaaggtcaagggtagtctgggcggcataggggccaaaggccgaaagggtcagtcgcagcggtctcatagggtgtcgccctccttccagatctcctcaatcagcgcttgacagaacgctgtctgctcggcggtcaggggctggttattctgcagctggtagaaggctgccagatgctccagcggggagatgctctcggtgcgctccggggcgcagatctcctgctgctggcgggtgcgctggttgtcgtagtccagctgcatcaggttggggtagatgacccgcagccgcgccagcgcatccggtacatcctgctcgtcggtcagggtgacgtacaggtagtcgtccacggcggtgccctcgtagcagcggcggtcggtcagttccatgtagctgccccgcagcccgcgcagctcgtgccggggggtcaggggcgcggtggtgatgtgcacctcgccctttgtacccagctccacaaaggtggcgcttttgtgctgccccgcctccgagaaggaatatttcagcggtgtgccgcagtagcgcaaggtctcccgccccaccttctgcgggctgtgcagatgccccagcgccacatagtcaaaggcatcgaacagggcggcgtccacgctgtccaccccgcccaccgagggttcttcgctctcgcaggcggcagcacccgccacaaactggtgcgccaccagcacgctgcggtggccggggtccggggtgcagtgccgcagcacgcaggcaagggcatcattgtagctttcaataggctcgtccggccagacgtgtcgcaccatggcgggctttaaaaagggcagtaagtacacatccaccgtgccgtgggcatcctgcaaagggatgggctgcggcgcaccggtgaacaccgggctgacgtagacccggctgtcggccagcagggcagagccaaaggccacccggtcagcggaatcgtggttgccgctgatggcgaacaccggcagcttccgcgccgccagttgggtcaaaaaccagtccagcagccgcaccgcttcggcagggggaacgggcttgtcgtaaaggtcgcctgccagcagcacgctgtccacaggggtctcatccagcagggtcagaatttgttccagaatataccgctgatcctccagcatggaaaactcgcacacccgcttgcccagatgcaggtcggacaaatgcagaaaacgcaaacaggaacaccgcctttcaaaaaatgctttgtcctattataacgcagccatcgccgcaggtgcaaccaaggagaacagaaaaagcacctgcaatgtctggaaacaatgcaggtgctcttgcctttagcgggctcgccctctccgtctgctcactgcgttcgcatccacctctcccaaagggagaggccttggcaaagagatgaactttgcgtggattgccaagggctcccactttgggggagctggcatcgcgtagcgatgactgagagggcgaggacgctgaccttgcgtagtaccctttgcaagcaatcagaacatcttttcccaagtggcgtagcccacgctgccgtctgccgtcagaccgttgcgccgctggaaccgctgcacggcggcagcggtggacgcaccgtatttaccgtcatccttcagtcgctcgcccagagagttgagcttctgctgtaccaaacgcaccgtgccgccggaagcgccggtgtgcagcacgatgccggggtagggcaccttcagcccgtgctttgcggtgtagcgggtgtagagcacgttccatgtgttctgccccactttgccgtccatgttcatcttgtttttcagctggaactcctgtacggcacgctgggtgccaacgccgaatttgccgtccgccttcagcgcatcgtaccatgtgcacgcatcgcgcacgccgttgagccacgtctgtacaagtgccacgtccggcccggaagaaccgcgctggagcagggaataataaccgggaatcgccataaggggatccctcctttccctccatgctatgctccggcggggtgcggcgtcaccccgccagcagcactgtctgccgccgggcggtcagccggtgcgcccagtccaccagccggaaccgcaggatgtactgcccgcagacaaggtcgttttccgcaggcagagcgtagccgccctgcgcaaagctgcacagccccgggtatagcacacaccaccagttgcgtccgccgccgctgccaatatcaatgcgcaccgcatcgtaccgtccggccggcagctgaccggtgggatagcgccgggcggggaagtacatattcacgagatacacccgcaccggggcacggatgccctgtgcgttcagcgcccgctgcgccgccagctgaaactgcaaaagccgccctgcaacccacgcccgcgcctccggtgcgctttgcgccgggcactgctgcatcacggaaagcaccgcatcccgcacccggagcttggcgctctggtcagccacggcgtcgctggccgcccggatgtgtagccgcagggtgtcggcgcacagcgctgccccggcatccagctgggtgcgcccccagtacagcccctgcaaagcgccgcacagcacaaagcccgccagcaagctggcgcacagcaaccgcatctgccggacggaaagcggctttaagaaaaaacgcaccataaaaaacagacccctcttctggaaatgataaccagaggatgggtctgttgcagcggggttatacgatttttttttagttcttcaacgactgcatgggtgcgggcaggcggccgccgcggttgatgaacaccgaggggtcgtggctgttcacgggcatgatgggaccatagcccagcagaccgccgaagtccagcacctcaccggccttgcggccgatggcggggatcacgcgcacggcggtggtcttgctgttcaccatgccaatggcggcttcgtccgcgatcagggcgctgatgacggcaggggtggtgtcgccggggatgatgaccatgtcgatgcccacagagcagacggcggtcatggcctccagcttttcaatggtcaggcagccgatctcggcagcgtggatcatgccggcatcctcgctgaccgggataaaggcaccggacaggccgccgacgtggttggaggccatcacgccgcccttcttcacggcatcgttcagcagggcaaggcaggcggtggtgccgcagcagccgcaggtctccagacccatctcttccagaatgttggccacgctgtcgccgatggcgggggtgggagccagcgaaaggtcgatgataccggcgggcacgcccagtgccttggaggcaaggtttgccaccagctggcccacacgggtgatcttgaaggcggtgcgttttacaagctctgccacctcatcgatgggggcatccttgggcaggcgtgccagcgcggcgcgcacagcgcccgggccggaaacgcccacatggatctcgcagtccggctcgccggggccgtggaaggcaccggccatgaaggggttatcctccggggcgttgcagaacaccaccagcttggcagcgccgatgcactgacggtcggcggtcagctcgctggctttctttacggcctcgcccatcagcttgatggcgtccatgttcagaccggccttggtggcgccgatgttcaccgagctgcacacgatgtcggtctcggccagtgcgcgggggatggactcgatcaggcggcggtcaccggcagaaaagcccttgtgcaccagtgcgctgtagccgcccacaaagttgacgcccacctttttgccggcggcgtccagcgtttttgcaaagtccacggggtctgcctccgggcaggcacccagcagcatggcaatgggggtaacgctgatgcgcttgttgatgatggggataccgtactcggcgctgatgtgctccacggtggagacaaggttcgcggccttggtggtgatcttgttgtagatgttctcgcaggcctttttggggtccgggtcgatgcagtccagcaggctgatgcccatggtcacggtgcgcacgtccagattgtcctgcgtgaacatctcgatggtttccaggatatccccggtgttaaacatactcatagcggttgcgggctcctttccggctcagatggtgtgcatggcgtcaaaaacttcctgacgggtcacgttgatctgcatccccatctcggcggcaagcgcatcggtgcgcttgtgcagctggtcgtggtcaacattgcagttggaaaggtccaccagcatgatcatggcaaacatcccctgcaggatgctctgggtcacatcctcgatattgatgttcaactcggtgcacagaccggccacctttgcgacaacgcccacggtatcgtgtccaatgacggtaatgaaagctttcatggtttccaccctcgttttccttatagtgattggtgccgccaaagacccggcacacgcttacccttccagtatagcagatttagcaaattttgaacacactttttgtaaaaaagagcagaatacaggggtaaaagacattctatataaaaatcaagtgcaatctgccggggcttgtgctatacttatatttaatttcccgcggatttccgtgtagagggttgataaggagtatatgacaatggaacagcttttgaagattctggaaaacaacgcccgtctgcccgtggaggacattgccaccatgctgaacaaatcccccgccgaggtggcggcgatgatggatcttgcccgggcacagggcatcatcaagggctacaagacccttgtggactgggaaaaggccaaggtgaaccgcgtggaggcggtcatcgagctgaacgtcagccccaaaaagagccgcggctttgacgagatcgcagccaccattgccgcctttgacgaggtggagagcgtgctgctgatgagcggcgggtacgacctgcagctggtgatcaagggtcagaccttccaggagatcgccctgtttgtggcaaagcggctgtctccgctggacgatgtgctgtccaccgccacccattttgtgctgcgcacctacaaaaaagaggggcggctgtatcaggatgaagaaattgatgaaagagagtgcacggtgctgtgatggattatgataaactgatcgcgcctgccgccaaggccatgcgcccctccggcatccgcaaatttttcgatctggccgccgaaatgcccgagtgcatcagccttggcgtgggcgagccggacttcaagaccccgtgggctgtgcgcgaagccggcattgaaagccttgagcatggccgcacccgctatacctccaacgccggcttaaaagagctgcgcgccgagatcagccggtatctggagcggcgcatgaacctgcgctacgaccccatgcggcagatcttagtgaccgtaggcggcagcgaagccattgatatgtgcatccgcacgctggtcaagcccggggacgaggtgatcatcccggagccctgctttgtgtgctacgagcccatcaccaccctgtccggcggcgtgccggtgcacgttgcctgccgtcaggaggacgagttccgtctgcgtgccgatgcgctgaaggctgccatcacccccaagaccaagctggtcatcatgcccttccccaacaaccccaccggtgcggtgatggagcgagaagatctggaagcggtggccgaggtgctgcgcggcaccgatatcatggtgctgtccgacgagatctacgccgagctgaactacggtctgcggccgcacgtttccattgccaccctgcccggcatggcagagcgcaccattgtggtgaacggcttttccaagagctacgccatgaccggctggcggctgggctacgcctgcggcccggaggcggtcattaaaatcatgaccaagatccaccagagcgccatcatgagcgctcccaccaccagccagtacgccgccatcaccgccctgaaagagtgtgacggcgagatcgaccggatgcgggacgagtacaatatgcgccgccgcttggtggtgcgcagtttcaacgacatgggcttgacctgctttgagccccggggtgcattctacgccttcccctgcatcaagagcaccggcatgagcagtcaggagttctgcacaaagcttttggagcaaaagcacgttgccatcatccccggcgatgcctttggcgcttccggtgagggctactgccgcgtttcctacgcgtacagcgtggagcacctgaccgaagcgctgaagcgcatccgggaatttctggtggaaaacaacatttaccacggcaactgaggagggacacagatggaacggcgagagcggagaaatgcagtgacggtgctggccccggccaagctcaatctggcactggacgtggtagggctgctgccaaacggctaccatgcgctggacatgaccatgcagaccatcactctatacgagcgtgtggtgctgcgccgcagcgccgggctcagcctgcagctgccgggcagccctgtgcagcccaacgataaaaacaccgccatcaaggcagcgctggcgttttttcactacaccgggctgctggcgggggtggatatcatcatccacaaaaacaccccggtgcgggctggtatggccggcggcagcgcggacgccgccgctgtgctggtgggactgaacgccttgtacggcgcaaagctttccatgagcgagctgtgtgcgctgggcgcgggcattggtgcggacgtgccctttgccctgatgggcggtacctgccgggtgcagggtgtgggcgatgtgatcaaggcgctgccgcccgtgccggactgctggttcacggtggtgatgccggactacggcgtgtccaccccggaggcctttgccgcctacgataccgtgggcagcagcacccacccggactgtgaagcgcaggaagcagccatccgcgccggagatctggacgccgtatgtgctgccgccggcaatgcgctggaagagtgcagcggtgcaaaggataacgaagcaatcaaggccctgctccgggcgcacggcgctgtcaccgcgctgatgaccggcagcggcgcggcagtgttcggcgtgttccgggacgaagctgccgccagagccgccgcagcggcggcaaagcggcagtggccgcaggtgtatgtggcgcagcccgaccgcggcggtgcccgggtgatccgctaaaaagcataaacctccttcccgcagggcatactgaccccaaaggaaggaggtctttttagtgcagaccttttacaaaatctgcctgctgctgctcatcgtgggcggtgtgaactgggggcttgtgggcttgttccagttcgaccttgtgggctggctgctgggcggcagcacctcggtgtggtcccgcatcgtgtttgcgctggtgggcttggctgcccttggtgccatcccggagatgttcagcgaggaaccggaagaataacaaaaacggctgctgcacaaaagcgtgcagcagccgtttgcgtattgcagtgcttccggtaaaaaagcaggtctggaaaatccttgtattttccagacctgaaaataaaaacgttttctgcgtggattacttgtcgttatccacatcatcccagccgataaggtcgggcagggtcagcgtttcgtccgagcagtgatggcttgtgcggcgctggtcggcggccttggtgtgcactacctcgcgggcaagttcccggatggcaacgcagtcctccggcaggtcggtctggctgcggccggagtgggtgaataaaatttttccctcatgccctacgatcagggtcatgggcaggatctgcggggcattgcggtcgtaatgatagccggcatcccgggcgcttttgtagatgcgctgggcagaaaagctccagctcaaaagcccgcgtgcctgctccacccccagataactgtacagcacacccggcgcatcgcagatgatggggaagggaaactccttcccctgtgtagcctcggctaccgcgcggggcgctgagcgcaccacacacgccagccgcacaccccgcagccgcggcagggtctttaagtagcgggtcaggtattcccgggtgaccgggtggtcgaacccgggcagaaagatcatgcacaggggctcggtgcccgcacacagggcgtaaaaatcgttgcccggggtggtgggagtgtcaaaggtgaaccggggaatggaagtaccaaccagatgctcagaactcatgccgcaattgcacatcctttcaagtggtgataaaaaaatccacagccgtgccctgtgtttgcaggggcacaagcggtggattggattactataaagatcccgcccggtcgtctgcggtcaatcaaacctacccttacggacaggtgggtgccctgtctccggaatcacgcttcctcatcgagcctccatggtcgacccatggcggggaggtctgcaatccaccggagaactccgggctcccgttgaatgattagtaggatcatacaaaccgcaacaaatcgagccgggcaggaagtcttgcacgggtcaatccgtcaaaggacttactcgatgtcgtagtcctcgctcagacgctgctcgaacagcttgctgacttccatcagcacctcgtcatcctctacaacgtccagatattcgccttcatcgtcctccccgacactcaggatcaccagctgggcgtcctcgttcacgtcctcttcgttttcggcgtattccacaacagccagataatgcacacccttgtggtccagcgcgtcgatcacctcaaaggtgacctcgttgccgtcctcgtcctcaagggtcatcaggtcaggctgatattcttcctcagtattagggttcttgatctcgtcagacataatacgctcctgtattgctttatcacaaaaagcagttgatgctgcgggctgcaccccgcttggtctgcttatagtgtagcgtgttttgtgcagttcgtcaagatgctttttcgcacagaaatcattggataaattttcacgcattttcctctcgcgctgccgcgcagaatatggtatactactggttgaatcttttgcgctgcaccgtgcagcgtgcagtacagtatatggaacagggagcgggaatatgttgaaaaaattcggggcagtctgtcttgcggcggtgctgctgcttaccggctgcacgctgcggccgcaggaaaacggcagcaaagtccagagcatcagccgcccggcggtggaatccgccgagctgcagttcacccacccggcagcaggggacacggttgcggtgttcgatacctcggcgggcgttttccgggcggtgctcttcccggaaaaggccccgcaggcctgcgataactttatcggccttgtgcagcagggctactacaacggccttaccgtaagccgggtggagaatcagttcgtggtggaagccgggcagggcgcagacggcaagggctctaccatctggaagggcagccgctacccggtggagacatcggacagcctgcaccattacgccggggcgctgtgcatgggtgtggacgcctccggcgagtgcgccagcgtgttctatgtggtggaatcgctgccgggagaacagtcggtaacgcaggaactggtggatcagatgaatgctgccggttaccgcgccgaggtggtatccgcttaccagacggcgggcggtgcaccctatctggactacaccgacaccgtgttcgggcaggtgtatgagggcatggacatcgtggacaccatcgcccagaccaccgtggacgaaaaccagaagcccaccgccgatatcaccatcaacagcgtgagcatcgagacctatcagggataaatagtaaagtcaaaaaatgatgcctgtgcgtgagcacaggcatcattttttatatctccccggggtgctccttgcgccatgcaaggtagtcctccagaatcaccgtggcgctgaccgaatccaaaatctccttgcggcggctgccgaaagtaccgctttcgtccagaatatcggcggcggcgcaggtggtctggcgctcgtcccacatccgcaccggcaggccgctccaaagttccacggtctttgccagcttgcggctcttggcggcgcgctcgccctcggtgccgtccatattcagcggcaggccgatcaaaatcatctcggcttcgatctccttggctacctcgcatacccgggcggctaccttgttgcgcgcctttaaggtgatctggggcgtgatggcggtggtaagaaattcggtgcggtcgcaggtggcaaggccggtgcggctgtccccgtagtcaacggctaaaatcttcatacaaagtccctttccgatgtgcaggctgttttttttcagtgtaccacagctggcaggggattgcaaagaaaagctgtggttttatcaccggtttcgtgttacaataaaggcaaaaatcaacgagcgggaggaaaccgaaatgctgaaactggttctgggcgcttccggcagcggcaagaccaccctgctgtatgcccgcatccgtgcccgcgccgagacgggaaagcgcagcatcctgctggtgccggagcagtttacttccagcaccgaagcgcgcatctaccgggagctgggagatgccctttccggcatggtggaaagctattcctttaccagtctggccgagcatatccttgcggctcttggcggcgcggcggtgcagaccctgaccgatgccgggcgggcggtgctggtgcgccgtgcgctggaagaattgcaggataacgtgcactactactaccgccaccggcgcagcgcggccttttgccagatggctgccgagaccattgatgagctgaaaagcgccgggctttccgggcagcaattgcaggagcttgcccgggactgcggctccgagagcgcaaagctgggcgaactggcactcatttttcagggctacgaaagcctgctggcgggcaccggcatggatcccgccgaccgtctggagctggcggctgaccgtctggaagccgcgcttgcccggaacgagctgccggactttttgcgggagcgcgaggtgttcattgacgagttcgataccttcaacgcgcccaaaaagcggctgatgggtgctatgctggctgcattgcctgccgtgacggtggcgctgtgcgaggacggcgcacccatgcagcccggggacttggaactgttctccggtgcaaagcaggtggcggcgcagctgcgccagctggcgcgcaaaaacggcgcacaggtggccgcgccggaactgctgcggcgggacctgcgccataaggatgcgccggggcttgccgccttgaccgagctgctggagaccggcagctgcaccccgccggaaagcgccccggagctgcggctgtttgccgccgccagccgggaggaggaagcccgctgcgctgctgccgccatccgccgcctgatgcggcagggggtgcgctgcggaaagatcgcggtggtctgccgcgatatcagtctgtaccgggctgcggtgcggtacgagttccgcatggcagagatcccgttgtactgcgacgagcccaccaccccggagttcagcgcacccgccacggcggtgcgggcgctgctggcactgctgcggggcgcggacatgaccgagcagctgaccgtgctggccaagaccggcctgtgcgacctgactgagccggaagtctgtgcactggaaaactacgcctacacgtggtcgcccaatgctgcggcgtggcgggcagaatttaccaaaagcccccggggcttcggcgatgccgaactgactgaggaggacacccagaacctgacccgcgccgaaaacgcccgcaaaaagctggtgacggcggtggataccctgcgcggcaaggtgcgcagcgccaacgccgagcagatcagccgggcgctgtatttctgcctgaaggagctgggcgcagagggacagcagactgcgcaggtggaggatatccgcactgcccggggcatcccggcggcagaggaagccgcccgcgagtggaacgtggtgatgcagctgctggacgagatggcgcggttgctgggcagtcagggcatcaccgtgccggagtacgaggatcttttcagcctgctgctgcgctcctccgaccttgggcacatcccgcagaccttggacgcagtggtgctggcaagtgccggcaaaatgcgtctggatgcaccggactatgtatttgtgctggggcttgcggagggggaatttccctgtactcccgcagaaagcggcctgctgacccacgccgaccgcgatctgctgatggcaaaacagatcgacctgccggactgctttgagaaccgggtggtgcgcgagcaggtctgtttttacaaagccctcaccgccccggcaaaggggctgtggatgagctggccgaaaggacaggggcagaccctgtgcgctgcgctggaacccatcgtggaggcattgcagcccgccgcgccgcagctggaactcatcgaccttgccgccacccccgcagacggcttagacgtgctgggcggcggctggccgatgaccgaactggaacgcgccagcctgaccgaggcgctgcgcagccccggcgaaggggtacaggcgccccgtgggctggcactgttacagcgcatggagcaggacccgccccggcaggtgcaggatctgcccacgctggaaatgctgctgggcaggcggctgcacatctcgcccagccagctggaaaaatactatacctgccgctacggctactttttgcagtatgtgctggggctcaaaccccgccgccgtgcggagctttcggctgaccagagcggcaccctgatgcactgggtgctgcagatggcgctggacccccaccccggggcggacaacccctgtgccgggctgcgcccctttttggaactggacgacgccgccatggctgaccttgccgccgcactggtggatgagtatgcgcggcgctatctgccggaggataccgcacgctttgcctatctgctctcccggctgaaaaagagcatgaccagcctgttgtgctatctgcgggacgagcagaaccagtcccaattcaagcccgtggcctgtgagctgaaaataggcaggggcgaggacgccgtgcctgggcaggtgtaccgcctgtcagacgggcgcacggtgcagctggtgggtacggtggaccgcgcggacgagtggatcgaggatgacggcacccgctgggtgcgggtggtggactacaagaccggcagcaaaaagctggacttgaaggaagtctactgcgggctggactgccagatgctgctgtatctgttcagcctgacccgggatgcgggcgggcgctttaccggcgcacagccggcgggcgttttgtatctgctggccgaccccgccccccagaccctgccgcgcgggcaggccgcccgggcagtggagtaccagctggacggtcttgtgcgggacgagcagaagatctttgacgcgatggacgcggacgaaaccggcaagtatctgccctttggctaccgcaacggcgcacccagtccctaccagaaggacaagcgggccgacagcgccaagctcagccgcatccagctgcatctggacgaccttgttacccagatgggtgagcagctttacggcgggcggatcgatgccgagccgctggtggtgagcagcagcaaaagcccctgcacctggtgcgattacagctttatctgctgccacgagaccggggtgcacgagcgtgcgctggaagcccctgcaaagccctttgaacccgaggaagaacccgaagaaaaggaggaacagccgtgagcggacccaaatggaccccggcgcagcaggctgccattgccgaccggggcggtgcgctgctggtaagcgcagccgcaggcagcggcaagaccgctgtgctgaccgagcgggcggtgcaactgatcaccgacccggagcacccggtaaacgccgaccggctgctcatcgtcacctttaccaacgcggcggcggcagagctgcgcgcccgcatcgggcaggcgctgctgcaccgcagccagctgcagcccggcaatgccatgctgcgccgccagcggatgcttttgcagcgcgcgcccatctgcaccattgatgctttttgtctgaacctgctgcacaagcactttcaggcgctggatatcccgccggattttgccccggcagaccccggtaccgtgcagctgctgcggggggcggcactggccgaaacgctggaaaacgcctaccgcgacccggatttctgcgcctttgcagacctgtacggcaaaggacgcacggataaaccggcgggcgatgccattttgcagatctacgattttctgcgggcactgccggactacgaccgcaagctggatgagtttcttgccccttacgagcaggaaaacggctttgccgccacctgctggcatgatctgctgctggccgaagctgcccgctgcgccaaggcagcgcgggaactgctgaaggcagcactggccgactgccgggcggattttgcacaggagcaggcagctgccgaggaaaaaaagaccccctccgcccgggcaaaggcacaggccgcggtggcagaaaaatacgaggaagccggtacaaggctggaaaaagccgccgccctctttgcgcaggcagagcagctggcagctgccggacagtgggacccgctgtacgacctgctcaccccctatgtgctgggcatggaggaagcgcccgggctgaaaggcatgaaaaagcgtctgggcggcgaccacaaggcggagatcaagacccgctcggacgaagccgccgccctgttcgagcagatgacccagctcatctgctgttccgaagccgaagccgagaccgaccggcagatcaccctgccccggctgcgggcgctgtttgccgccgtgcgggacttcgatgcccggttcacagccagaaaaagggagcgcaagctgctggaattcagcgattttgagcaccttgccctgcggctgctgcgcaccccggagggcacgcccacccccttgtgtgagaacatccgtcaggactacgccgccgtgatggtggacgaatatcaggacacgaacgccttgcaggatgccctttaccgctgccttgccgccccggcgggggataaccttttccttgtgggcgacttaaaacagagcatctaccgtttccggcaggcagagccgggcatcttccggcaaaagctggacagctggtcgctgctgccgggcgcaaaagcccgtccccgcccgccggagggcaccccgggcacggacgctctgctggcgctggatgcaaacttccgctccgcaccgcaggtggtggcgggcatcaattatctctttgagcagctcatgaccccggagctgggcgataccgcctacggcaacgggcagcgtctggtctgcggtgcgcccggggaatatcagggcagcgtggaggtgcagtttctgccggacgatgagacggaaaccgatgcaggctggatcgcggaacgtatcgcgcagctggtttctgccggggaaccggtgcgggagggcagtaccacccgcccggtgcggtacgaggactgctgcgtgctgctggcggcgcgcacggatttcccggtgtatgtggaggcgctgactgcccggggcatcccggtatacgccgacgcccgggagaacctgatgcttgcgccccacatccgccccctcatcgccctgctcaaggtcatcgacgacccctcgcaggacatctatctggccgccgccatgctgggtcccatgttcggctttacggaggatgaccttgtgcggctgcgcgcccgcagccgtcaggtacaggccgaaccggacaaaaagcccgcccgcatcagcctgtacggcacgctgctgctggcgctggaggacccggcagacgatccctttaccgagaaggtgaaggatttctacgctcatctcaccgcgttgcggcagatggcgcgcagcgccccggcggagcagctgctggaagaaatttttgcctccaccggctatctggcggcgctgggcgtactggaaaacggtgcccgccgccgggaggatgcccgccgctttgcaaccttctgcgccacttccggtgcaggcggaatctcggcgctggtacgcgctattgatgccgccgcacaggcaggcagcaccggacaggacaccgtgcccagcggggtgcacccggggtgcgtgtccatcatgaccatccaccgctccaagggcttgcagttcccggtggtgtttgtgggggatacagcccgcaagttcaacgcctcggatatccgtcagccggtgctggtgcaccgcactttcggcgcggggctgcggctgcgcccggaaaacggcgagggtgcttacaagaccgccgcctacaccgcgctggctgctgtccatgccaaggaactgcgcagcgagcagatgcgccttttgtatgtggcgctcacccgcgcacaggataagctcatcctcactgtgcccctgagcagcggtaagactgcaaagccctttgccaaggcggcggcttttctggctgccggggcgggggctacgctgcaccagcaggccaacagctttgccgactggctgcgggcggcgctgctggtgcacccggacggcggggtgctgcggcagctttccggcaaccgggagctgctttttgtgcagactgaaagcgtgatggatatcgaggtgtgtgacgatgctgtacagctgtccgaggaaccggatgcagccacgccggacgaagcaccggagaccgacccggcactggtggagaagctgcggcagggctttgcgtggcagtacccggcggcagcgcttgcacaggtgcccgccaaggtcagcgtgaccagcatcgtgcataaggccgagcagaccacgctggagcgcccgggcttcctttccaaggacggtctgaccgccgccgagatgggcacggctctgcacgcttttctggagcacgcagactttgcccggctggccgaagccaaggctgcgggcacgctggacaaggccatcccggcagagcgggatcgtcaggtggcggtgcagctgaccgccccggagatcgcggaaaagctggatgcagtgtgcatccgccgctttgtggaaagcgaagcctttgcaaagatctgcgccgccgggcaggtgctgcgggaactgccctttatcaccgcgctgcccgccggtgcagtgctggcggcacaggggcacgaagcgctgcctgctgccgcagacgcgcaggtgctggtgcagggcatcgccgaccttgtgctggtgtacccggatcatctggaactgctggactacaagaccgaccgccgcaaagccgagagcgatttcctgcgcgcctaccgcgcccagctgaacctttacgccattgccatcgaaaagcgctttgcgcctaaaaaggtgacctataagggcatctactcctttgcactgggcaaattgatcgaagcgtaaggggaataccccttcagtctgctcgtttcacgcgcaggcgatgacggaaggggtaaaatggcagcttgtgcgtcccgttggccggaaagtcatattttttccaaagaacgcataaaaagtgcttgacagggcaggtgaagcgtggtaaaatagccgagtaaagaaagcagctacggcctgtgccgcgctcgccttgcgggaaaacgtccccgggctatacccgaaacagcagcttattcctttgagaatgctgcggctttgtgtgaaatttcgcgcggctgtccagaatatgggcggccgcgttttctatgccaaatattgcaacactatggattttgtttggaggtgcattcattatcgctaccgctggaaagtcgaaggaactggagatcaacggccagatccgtgatcgtgaggttcgcctgatcggtgctgacggcgagcagaagggcgttgtgtccattcaggtggccatgcgcgctgcagaagaagccgggctcgatctggtaaagatcgcaccgcaggctgtgccgcctgtgtgcaaggtgctggactacggcaaataccgttttgaacagcagaagaaggagaaggaagccaagaagaaccagaaggttgtcgaggtcaaggagacccgcctttcgctcaatattgacaccaacgacttcaacaccaagctcaaccagactgccaagttcctggcagccggacacaaggtaaaggtttcgatccgtttccgcggccgcgaaatggcgcacagtgctctgggcgcagacgtgctgaagcggtttgccgaggctctgcctcaggcatccaccgataagccgcccgtgctcgagggccgcacgatgtccattctgctgatcccgaaacccaataaggactaattttaggaggaaactaaaatggctaagatgaaactgaagacgcactccggcgctaagaagcgctttaagctgaccaagaacggcaagatcaagcgcggtcatgcattccgcagccacatcctgaccaagaagaccaccaagctgacccgtggctaccgtcagcccagctacgttgataagaccaacgcagctaccatcaagagcatgctgccctacgcctaagagcgagccgcaggtacacaaaactttctacgagatactaaaggagatataaaaaatggcacgtatcaaaggcgcaaccatgacccacaaacgtcgtaagaagatgctgaagctggccaagggcttctacggctgcaagagcaagcactttaagatggccaagcagcaggtcatgaagagcggcaactacgctctggctggccgccgcatgaagaagcgtcagttccgcaacctgtggatctgccgcatcaacaacgcagttcgtcctctgggcatgaactactccacctttatggctggcctgaagaaggcaggcatcgagctgaaccgcaagatgctgtccgagatggccatcaacgatcctcagagctttgccgctctggtcgagaccgtgaagaacgcctgataaagaccttgcatcgtgacgcccgcgcgtatacgcgggcgtccgttttgtatccgggcattttttgcggccagggaaacaaggcaacggggcagcgccctgccgcagaaacctgcggcagacgctgccctttttctattgtatccatagcaattcaactttataatgcgacggcaacagcgttgaattgcatatcgcaaatatgctgtttggataccgaattgacttcttgacttgcgataaagcaaaagcatacacacctgttcgggagggactcatggacgaaaagatcaccagccgggaaaacgcaaaagtaaaatatgcctgccgccttgcttccagcgcagcattccgccgcaccgaggggcgttttctggccgaagggcgcaagctgtgcccggagctttgccgcggtgcagagctggagaccctgttttataccgaaaatgcgatggaaaaatgcccggagcttgccgctttgccgggcgagcattatctggtagaggatcatgtggcggacaagctggcagacgtgggcacccatcagggggtgttcggggtgttccgcaccccggtgcacaccttggaagaggtgcgcaccggcgggcggtatctggcgctggaacgggtgcaggaccccggcaatgtgggcactttgctgcgcagcgcagcagcctttggttttgacggcgttatcctgagcgagggctgcgccggcgtctacgcgcccaagaccctgcgcgcttccatgggcgcggcggtgcgcatcccggtcattgagaccggtgccatgccgcaggccatcgccctgctgcggggaaaaggcatcacctgccttgcggcggcgctgtaccagtcccagccgctcagcgcggcaaaggccgggtatcccggcggcgtctgcgtggtcatcggcagcgagggtcagggcctgaccgatgagaccatcgccgcctgcaacagcacggtgcgcatccccatgaccgaccgggtggaaagcctgaacgccggcatcgcgggcagcatcctgctgtggcatttccgggaggagagcctgtgaccgggcagaccagcctgttcccgccggagcctgcacccgacccgctgctgtgctggctgtggctgtcgcaggtgctggggcccgccagtctccacgccggaaaggtgctggatgcctttggcggcgcacaggaggcatgggaagcgcgggagaccgaggaattccggcaggcagcaggggatacagcctttaagcgggcagcacagctggatgcagaaagcttccacacgctggtgatgcagtgcgatgccctgcgggtgcgcatcctgccctttgacgacccggactacccgctggctttttcccgcatcccggatatgccgctggtgctctactgcaccggcgacccccgctggctcaacgagcccggggcggtgggcatcgtgggcagccgcaagcccacggaatacggcctgaatgcggcggcggatatcggcggcgaactggcaaaaaacggagctgtcatcgtcagcggtctggccgatgggctggacagcgccgggcaccgggcggcggtgatgaacgactgccccaccatcgcggtgatgggcgtaccaatcgaccgcacctatccggcagccaatgccgctctgcggcagaaaatcgagcaaaagggctgcgtcatcagcgagtacccgccatacagtgaatatgtcggccctacctgctttttgcagcgcaaccggctcatcgcggcgctttcctctgccgtactggtggtggaagcacgggaaaaaagcggcaccatgtccaccgttgcccacgccgagcgctacggcaagccggtgtacgcggtgccgggcagcatctactcccccaactcggcgggcacgaacggcctgctgcgggacggacgcgcccgggcagtggcgggtgcagccgacctgctggcggcgatgggcctgcacacccggcaggcagcaccggcggctgcaaagcagcctgcacccctgagcgataccgagcgccgggtgctggcgggcatcgggccaaagcctgtgggtatcgaggagctgtgcgtgagcaccggcctgcccatgtccgcactgctgggcaccctgatgaagctggaactcaccggccgggtgtacaagcagccggggcagcggtatgtgttgcggtaaaattgtggaatatttccgctggtaaagcacacaacagctgtggtacaataatatgagcaaatgaccgtgcatccctttgggcgcacgttgcagatagaggagaaaagaagaaatggcgaaactggttatcgtggagtcgcctgcaaaggcgaaaaccatcggcaaatatctgggcgatgactacgaggtcaccgccagcatgggtcatatccgcgatctgcccgcatctcagctgggcattgatgtggagcatggctataccccgcaatacatcagcatcaagggcaaggaaaagctcatcaaagagctgaagagcaaggccaaacacgccgacggcgtgctgctggcgaccgacccggaccgcgaaggcgaagccatcagctggcatctggcaaacattctggggctggacccccacgagcccaaccgcgtcacctttgacgagatcaccaaaaaaggcgtgaaggagggtatgtcccatccccgtgccattgatgaagatctgttcaacgcccagcaggcgcgccgtgtactggaccgtctggtgggctacaagctcagcccgtttctgtggcgcaaggtgcgccgcggtctgtccgcaggccgtgtgcagagcgtggcggtgcggctgatcgacgaccgggaaaaggagatcgaaaactttaagcccgatgaatactggaacgtggacgccaccttgggtgccgggcacaagagttttgtggcacgccttgccacggacgccaacggcaaaaagctgctgcccaaaagcgagacagaagcacgcgccatcgagaagggtttggagggcgcaagctatgtggtgagcgagctcaagcgcggcaagcgcgcaaagcagcccaccccggcctttatcaccagtaccctgcagcaggaggcctcccgccggttgggctttacggccacccgcaccatgcgcgccgcccagacgttgtacgaaggcgtggatattgccgggcacggcatgatgggtctgattacctatatgcgtaccgacagcctgcgcatctcggacgaggctgtggccgccgccaaggagtatatcgccggtgcttacggcgaggcatatatctgcccctataagcgcacatggaagaccaagagcgccacggcagcacaggacgcccacgaagccatccgtccctctgtgccctccctgaccccggacgaggtggacaagagcatcagcggcgacaccgcaaagctgtaccgcatgatctggagccgctttatggcaagccagatggcagactgccagcaggacaccgtgtcggtcaccgtcagcgcggcggattaccacttcaaggccagcggctacaccgtgacctttgacggctttaccgccctgtacgaggaagccaccgacgaaaaggaaaagaaggaaacgaacctccccccgctggagcagggacaggtgctcaagctgcgggaacttaagagcgagcagaagttcacccagccgcccgcccgctacaccgaagctaccctcatcaaggcgctggaggaaaacggcatcggtcgcccctccacctacgcgcccatcatcaccaccatcatcgaccgcggctatgtggagcgcgaccagaaaaagctcaagcccaccctgctgggccgggctgtggacgggctgatgctggaacagttccctcacatcgtggacgtggatttctccgcccagatggagaagaatctggataaggtggaaagcggcaaggccgactggcgcaagaccgtggatgacttctatcagggctttgaagccagtctggaacaggctgaaaagaacatggaaggcaaaaaggtcaaggtgccggacgagccctccagcgaggtgtgcgacctgtgcggacgccctatggtcatcaaggtgggcaagtacggcaagttcctcgcttgcagcggcttcccggagtgccggggcaccaagcgtctggtcaaggacaccggcggtatctgccccaagtgcggcaagggacgtctgctggagcgcaagagctccaaggggcgcatctactacggctgcgagtgctacccggactgcgattttatgacttgggatatgccggtggctaccaagtgcgaaaagtgcggcagcaccctgttccgcaagggcggcaagctgtactgcgccaaggagggctgcggctttgagatgccggtgcccaaaaaggactgacaaaaaccgaggatgacgcacatggtcagcatcctcgccctctcagtcaaagcctgtcggctttgccagattcccccttttgtcgctgcgcgacatcttcccccggccgggggacgtcggccctcaaagtgggagcccttggcaatccacgcaaagttcatctctttgccaaggcctctccctttgggagaggtggatgcgaacaaagtgagcagacggagagggcgagcctgctagagcaaaactgcaacataaattcgacgattttctaaaacccaaaggaaagactaaatgaacgaatataaagtaaccattctgggcgcgggtctggcgggctgcgaagcggctctctggctggcgggcaagggcgtgcaggtagagctgtacgagcagaagcctgtccacttttctcccgcccacaaaagcgagggctttgcggagctgatctgctccaacagcctgaaggctgagcggctggactctgcctccggtctgctgaaggaagagatgcgccgcatgggcagccggctgctgaccgccgccgaggagacccgcgtggctgccggcggtgcgctggcggtggatcgcgatgccttcagcgccgccgtcacccgcatggtggagcagtgtgaaaatatcaccgtccaccgggaacaggtggaaaccatcgacgagagcgctcccattctggtggccaccggccccctgaccgacggtgcactggccgatgagatcggacgcctgaccggggacgagcggctgcacttctatgatgccgttgcccccatcgtcaccgccgaaagtctggactacggcaaggtgtttgccgcttcccgctacgaccggggcgaagccgactacctgaactgccccttcaataaggcagagtacgaggctttccacgccgcgcttgctgctgcggagcgtgcccccctgcacgactttgacaccggtgccgagcagagcgcaaagcccgatccggacgcccacggcaaaaaggccgataccgttaccgtgtacgagggctgtatgcccattgagatcatggctgcccggggtgccgacaccatgcggttcggcccgctgcgcccggtgggtctggtagacccgaacaccggccaccgtccttgggcaaatgtgcagctgcgcgcagaaaataaggagcgcaccctgtataacatcgtgggcttccagacaaacctcaaatggggcgagcagaagcgggtgttcagcatgatccccgggctggaaaatgccgagttcgtgcgctacggcgtgatgcaccgcaacacctttctggatgcgccccgggtgctcagcgcccagctgtgcctgaaagcacaccctaacgtgttttttgccgggcagatcaccggctttgagggctatatggaaagcgccgcctgcggtctgctggcggcacgcaatctctacgcccgcctggagggcagacagctgcccccgccgcctgccgataccatgtgcggcgcgctggtgcagtatctgaccaccgagaacaagaacttccagcccatgggtgcaaacatgggcattctgccgccgctgcccgccgagactcgtccccgggacaagcggctgcgttacatggcacaggccgagcgcgctgttgccagcttccagcagtggctggaggaaactgctctgtaaggcaaagcacctgaaaggagaaaacaggtatgaagatcattgtggacatgatgggcggcgacaacgccccgctggctgttctggaaggcgctgcacaggccgttaaggagtacggcgtgcagctgatcggcgtgggtaacgaagcgctggtgcgcaagactgccgccgagcacaacattccgctggacggcatcgagctggtgaactgcaccgagaccatcgagatgtgtgacgagcccgcccgcgccatccgccagaagaaggattcctccatcgtggtgggtctgaatatgctcaaggagggcaagggcgatgcctttgtctctgccggcagcaccggtgcgctgcacgttggcgcaagcctcatcgtgcgcaccctgcggggcgtcaagcgcccggcactggctaccatggtgcccgcaaagcagcaggcttatctgctgctggactgcggtgccaacgtggagtgccgcccggagatgctggccgcttttgcggtcatgggcagctgctatgtgaacaaagtagagggacgcaaaaaccccagcgtagcactggccaacaacggtgccgaggagagcaagggcacccccgtgctgcgggacgcccaccagctgctcaagactaccccgggcatccgttttgtgggcaatatcgagccgcgtgatgtgcccaacggcgaggtggacgtggtggtctgcgatggctttaccggcaacgtcatcctcaagctgaccgagggtgtggcaaagatgctgctgggaatgttgaaacaaatgttcctcgcaaaccttggcggcaagctggcgtatctgctgctcaagggcggcgttactgacctgaagcaccagatggacagcgaggagtacggcggcgcgcccttccttggcgcaaagcagccggtcatcaaggcacacggctcctccaaggcaaagggcatcaaaaacgccatccggcaggcaaagatctgcgtggagaacgatctgtgcggcaccatgcagtccgcactggacgaactggccgcagcgcagaaaactgaggaataaaagggagtaaaaacgaccatgagccatcagttggaaactatcatcggttacaaattcaaaaacccggagctgctggagatcgcacttacccacaccagctacgccaacgagagccgcaccccggtcaagcacaacgagcggctggagtttctgggcgacagcgtattgcagatcgtatccgcggactacctgttccacgcctacgccgaccgcccggagggcgacctgacccgcatccgcgccagccttgtcagcgagggtgcgctgttccagttcgcacaggagatcggtcttggcgagtatctgcgccttggccgcggcgaggagcgctgcggcggacgcacccgtcccagcgtggtgtcggacgccttcgaggccgttattgccgccttgtatctggacggcggcatggaggtggcgcgcaagttcatcctgcccttcatcaccgagggcaagcacgccgaagcggactacaagacccgtttgcaggagatcgtgcagcagaacccggaagagcgcctgagctatgtggtggaaagcgagtccggcccggatcacgacaagcattttgtggtggcagtgcgctttaactccgaccgcgtggcgcggggcgagggacgcagcaaaaaagccgccgagcagtgcgccgccaaagaagcgctcaagctgctgggcgtgataaaggaaaagtaaatggtattcaaggaactggagatccagggctttaaaagttttcccgataaagtaaagatcagctttgataccggtgttaccggcgtggtggggcccaacggctccggcaagtccaacctttcggacgcagtgcgctgggtgctgggcgagaccagctcccgccagctgcgcgctgccggcaagatggaggacgtcatcttcggcggcacccgcaagcgcagccctatgggctttgcgcaggtacggctgacgctggacaatgccgcccacacgctggatgtggacgcggacgaggtgaccatcggccgcaaatattaccgctccggcgacagcgagtacaccatcaacgggcaggtatgccgtctgcgggacgtgtacgagctgctgctggataccggcatcggacgggacggctattcggtcatcggacagggacgcattgcggagatcgtggcagcaaaaagcagcgagcgccgcgagatctttgaggaagcctgcggcattgccaagtaccgctaccgcaagaccgaagccgagcgccgtctggctgcggcgggcgagaacttggagcgcctgcgggatatccttggcgagctggaaagccgggttggcccgctggaaaaagagagcgccaaggcgcagaagtttctggaactgagcgcccagcgcaaaacgctggaagtgaccctgtggaccgacggggtgcaccgtgcccgggaagccgtgcgccagcaggtgcgggactacgagaccgcccagaccgactacgagcgtttcgaccgggagaccaaggccgccgagcaggaggctgaggagatccgtatgcaggcacagcagctgacggttgctgtcgagcgcctgaatggggatatccgcagcatcacccagcagatcagcggctccgaaagccgcatcgccgtgctggaaaacgacattctgcgcaacggcgagagcgcggcttccctgcagcaggagatcgctgccgggcagcaggacaccgccgaagcggatgccgcgttgcagcgccaccgcgccgtggcaaagaccatggaagcggcgagcgaaaagctggcggcagagatcgaagcgctgaacgccgagcttgcccggctggcagatgccagcaccgccagcggtgcccgcaaggacagcctgcgggcagaacttgccgaccgcaccgcaaagcgcaccgaagcacaggtggcacaggcagccgccgaagccgccggagataccgcccggcagcgtctgcccgcgctggaacagagcgcccgggacgccgccgcacagctggaagagaccaaacaggatctggccgataccgtaaagtaccgccagacgctggaggaaaacgaaaagcagctgggcaacatccgctccggtctggaactcaagctgcgcagccgcaaggccgcgctggacgaagccgatgccgccgagcagcggctgggcagggaactggatgccgcccggcagcgcctttcggtgctgcgggaactggaaaagaacatggacggctaccagaactcggtgcgcgcggtcatgcgcgccgccggggcccgccgcctgcggggcgttctggggccggtgtccaccatcctgaaagtggagcccgggtgcgaggtggccattgagactgcactgggcggcgcattgcagaacatcgtggtggaaaacgaagccgccgcgaaagccgctatcgccctgctgcgcaacgaccatgcaggccgcgccaccttcctgccgctggataccgtgcagcccggcgcgttccgaggacggctgtccggcacggcgcggctggcctctgcgctggtgcaggctgacccccggtacgagaatatcgtctcgaacctgctgggacgcatcatcgtggtggaggatatcaacgaagcctcccgtgtggcgcgggacaacggctaccacaacaaggtggtcaccatggacggacaggtgatcaatgcaggcggcagctttaccggcggcagcgtgcagcgcagcgccggtctgttcacccgcaagcaggaaatggaagaactgcgtctgaaggcggcaaagctgcaaaaggactgcattgccgcacaggaaaagaccgaccagtgtaaagagcaggcagatgctttgcaggcagagctgaccgccaccgccagcgagcagatcaccgccgccaacgaccgcgtgcgtgcagagaccgagcagaagcggctggaagccgccgccgcccagctggaaactgccgtgcagaacgcacagcagcagatggacgccttgcaggctgccttgaacgacagccgcaccaaggccgatgccgcagccttgcagcaggcagagctgacggcgcagatcgagcagctgactgccgagctgagccgcatcgcgcagggcagcgacagctttctgacccagcagaaccagctggcacaggcgctcagcgccaaacggctggaacaggtgacccgccgcaaggacgcagaactggcttacagccagatcgctgcgctggaacagcgtgcaaaggacgccgctgcccgccgcaccgcgctggaagaaagccttgccgcccttgctgcccgcagcgaagcctgccgcaccgagatcgcagccatccgcaaggccaagaccgacagccagactgccattacccaaaaggagcaggccatccgcgaagctaccgaaaagcggcttgcctgccagcagaaggaaacggaagcgctggcaaaagcccgcaccgcctccgacagccgcgaggagatgggccgggagatggcgcgtctcgccgagcgcaaggccgctgccgagagcgagtacgaccagaccgtggcaaagctgtgggacgagtaccagctctcggtcagtcaggccgaggagctgtgcgtggagttcgacagcctgaccgctctgcgggcacaggtggctgacctgcgcggcaagatccgcgcccttggcagcgtgaatgtgagcgccatcgaggagtacaaggaggtcaaagcccgctacgatgaactgtcccgtcaggtgactgacgtggaggagagccgcaacgagctgagccgcatgatcgcaaagctttccgcccagatgcgggagatctttaccgacagcttccgcgccatcaacgaaaacttcagccgcgtattcaccgagctgttcggcggcggcgaagccagccttgtgctggaggacgaaagcgatgtactggcctgcggtatcggcatccgggtagcgccgccgggcaaggtgatcaaaaatctggaagctctttccggcggcgagcaggcgctggtggcgatcagcatctactttgccattctggctgtgaaccccgcgcccttctgcattctggacgagatcgaagccgccttggacgatgccaacgtggtgcggtttgcccagtatctgcgccgcatcagcgacaagacccagttcatcgtcatcacccaccgccgcggcactatggaagccgccaacgtgctgtatggcgtgaccatgcaggaggacggcgtgtccaaactgctcaagctggatctggaacaggttgacgcaacgctggtttcctgatataaaataaacagaaaatagataggaggaccactatggcgttcttcggatttggaaaaaaagaaaaagataagatgaaaacgggtctggaaaagacccgcaccggcttttggggcagcattatgaacaccctgaccggcagcgtcatcgacgatgagatgtacgatgatctggaagaaaagctgatccttgccgacgtaggcggcgaggtagcggtgcatctggtggataagctccgcgaccgtgtgcgtgacaaggggctgaaaaccggcgaacaggccgcagatgccttgcgcgacatcattgccgaggagatgaccccggaagctgagatggcgctggacggcaagcccgccgtcattctggtcatcggcgtcaacggcgtgggcaagaccaccagcattgccaagctggccgattactacacccggcagggcaagcgggtcatgctggctgccggcgacaccttccgtgctgctgccagcgagcagctggagatctgggcaagccgcgccggtgtgcccatcgtcagcgcgggtgagggcgcagaccccgccgccgtcatctttgatacggtcaagtctgctactgcacgcggctatgatatggtcattgcggacaccgcaggccgtctgcacaacaaatcaaacctgatggcagagctttccaagatcagccgcagcgtcaaaaaggcaagcccggaagccagccttgagactctgctggtgctggatgccatcaccgggcagaacgccatcagtcaggccaaggagttctgcaaggctgcagatgccaccggcatcatcctgaccaagctggacggcaccgccaagggtggctgcgttgtggcggtcaagcagcgcctgggcctgccggtgcgctttatcggcgtgggcgagggcatcgatgacctgctgccctttaccccggagggctttgtggaagagctgctcccccgggaatggaagcactaaggagggcgcggaaaatgaaaatttgtgcagccaccggcaacgccggaaagcttcgcgagctgcgccgcattctggaagcgcaggggcacgaggtggtcagccagaaggaactgggcatcaccatcgagccagaagagaccggaaccacctttgctgagaatgctctcatcaaggccgagactatctgcaaggccagcggtctgcccaccatcgccgatgactccggcctgtgtgtggatgcgctggacggcgcacccggcgtgtacagcgcccgctactgcggccaccacggcgacgatgaagccaacaacgataagcttttggctgctatgcaggcggtgcctgccgggcagcggagggcaaagttcgtctcggcggtgtgcttcatcctgccggacggccggcacctgacctgcatgggcgagtgcccgggcagcatcgcttttacgcggctgtgcggcgactacggctttggctacgacccgctgttcatccccgccgactgcggtgtgggcaaaacggacaagcgtcccaacaccgagaaccgcagctacgcccagctgaccccggacgaaaaggacgccatcagccaccgcggcaacgcgctggcagcgctggaaaagcagctgcccagctttctgagtgcagtcacggaagaaggcgttatcgcacaggtgtctggaaaagtagagatcaagctgaaatgatcgtaagtccgaagatggctcgccctctccgtctcaccttgttcggcacctctcccaaagggagaggccttggcaaaaccacaaactttatctcctcgccagaggctctccctttgggagagctggcgcgaaagcgcctgagagggcgaggtcgctgacagatacgccccatcccgtgaaaaagtaaaattgaaaaatccgaaatatcaacctcaaaataaaggagaaaaactatgctgactagcaaacagcgcgctattctgcgcggcaaggcaaataccatggaccccgtttacatcgtgggtaagggcgagatcgacgagaccctgattcagggcgtgaaggactgtctggacgctcgggaactcatcaagctcaaggtgctggaaaacagtatgtacaacgcccgcgaggctgctaccaagctggcagaggccaccggcgcagactgcgtgcaggtcatcggctccaagttcgtgctgtatctgcaaaagaaaaaggacagtgcctacgctgccctgctgaagtaagatgaagatccttctctatggcggcagctttgacccgccccataacggccacctgaataacctgcgtgcagcggcagaccgcgtgcacccggataagatcgtggtgatgccggcaggcacttccccctttaaggaggggacaaatgcttccggtgcgctgcggctggaaatgtgccggtgctttgcggcactggcgcaggagcccgggatgccgccgctggaagtaagcggctgggaggtggcgcaggccgcagcgggcagccgcaattataccgtgctcacgctggaaatgctggcgcgggaaaaccccggcgctatactgtatttggctattggcagcgatatgctgctcagctttgagggctggcaccgctggcaggatatcctgcgcattgcgcgggtggtggtcaccagccgtgatatcggcgatgccccggcgctgcacgcaaaggcaaagcagctggacccgtcgggcggacgcatcctgtttgccccggtacaggcgctgcctatggccagcagccagctgcgggcccggcttgccgccggagaggagtgcaaaaccgaactgccggaagcggtgcgcaccgtcatccggcgggagggactataccggaacacagaaggaagtagcagataaatggagctgaaacaggcaaaggaacttgtgcgcggccgcttgagcgataagcgctacgagcataccatcaacgtgaaaaaaatggccgtcaaactggccaagcactacggcaccgacccggaacaggccgcactggcggcgcttttgcacgatgccgccaaggaactgcccaaggacgagatgcgcgctatcatgcaggcatacccgcagtatgcgcagggcggcgaagcacgccccacgccggtgtggcacggcatctgtgccgccattctggcgcgtacggagtggggcgtcacagacgaagccgtactcagcgctatcgcctgccataccgcaggcaaggcgggcatgacccagctggacaagatcttgtatctggccgatatgaccagtgccgaacgggactggcccggggtggaaaagctgcgcaagctggaaatgaaggatttggacgcggccatgctggcggcgctcaagcagaccaacggctttgtgctgtccgagggcaagcccctagaccccgagagcaaggccgcctacgaggatatcttagcgcacagcgggcagaatgaagggtgaaaagccgggcaccgattaaaaatggtttcggccatccccggataaaacaattgcagattttgccgtaccatgctatactgaaggatatgacaggtctgcaggtaaaaaactctgcagagcagtgaaaagctggaggatataaaagcatgagccagacgccacgccatatcaatacagaccgctcgctcagccgcccggatcaggcggcgcgtgccccgcaggctgccccggagcagaacacccgcagcactgccggggcgcagcacgccgcgccgccccgctatgcagcacagcccgatctgggcggggacgatgcaccgcgccgccgcaaaaaaaagaaaaagaccccgttgtggctgccctttgccatcgtgatgggcgtgattgccgtgatctccggtgtggtggtgtacggtgtgagccttgtgaacaaggtggaggacagcatccgcccggcagaaagtgccccctccatcgtggaggagatccagaccgccgaggagtacaagggcgatgtggtcaacattctggtctgcggcatcgactttgaagagggacgctcttacagcgacgccagctccaacgacggcatgacggatatgatcctgtactgccagtttgatatcaagggcggtgcgctgcggatgctgcagatcccccgcaacacgctggtgaccacccagaaccgcaagcttaccctttccaacggcaagacctatgccgtttccaactaccagatcaactcggtggcgctttccaacggcggcagcattgccgcgctggcagatgtcatctacgaccagtaccacctgcccatcgactactatgttaccatcgatatgcaggcgctggtggaaatggtggataacttcggcggcatcgaggtgtatatcccccgggatatgtcctacggcggcagcaagctgctgaaaggctaccgcaatctggacggtgcttcggcggagttctttgtgcgctgccgccacggtgacggctacgcaaactctgatatcgaccgcttgaatatgcagcgctacttctacgcaggtctgttcaagcgcgcccgcgctatgggcattaccgatatcctgaaccagctgccgctgatattcaaggactatatccacacggatatggatatcaccaccatcgcaaagctgctggcgtccttcctcaagatcgacagctccaatatcattctggcgcagacgccggtgttcatgggcgtgcccaacgtgggcaagaccgactcctttgccggctactcctgcgtggtgccggatgccggttccatcgcaaacctgctcaaccagtatttctgcacctacaccggcccggtggaggtaagcgagctgcacatggtcaccgaccagtggccccacggcagcgcatccaccgatgccaacgtgcagtatatgggacgcatcgacaaggaatccgatgacgccatcctcagcggcgataccgacctttccggcgctgtgaccaccgatggtcaggcagcgggcaccggacagtaacaacaaaaacaatgccctgcacaccgggtgcggggatgttccgacagaagggagaaacacatggataatttcaacgacagcaaggcgcttgccattgagatcgccaagattttggacaagaagaaggcacaggatgtgcgggtgctcaaggtggaaagcctgaccgtcctgaccgattacttcgtcatcgcctccggtacctccaccacgcaggtggcgtctctggcagacgaggtggagtacgagctttcgcagaagggtctggagccttacagcaccgagggtcacgacaccaagaactgggtgctgctggattactccaacgtcatcgtgcacgtctttgtgcccaacagccgcgcttactatgatctggaacacctgtgggcagacggcgagccggtggacatttcggagtacctgaccccggatagcagcattgaataattaaggcaaaaaggtttgcttctggcagaacccgctccgttattgcggcgaaatagggaaagttggcagaaaagctcccccctcgggggagctggcagggcgaatgccctgactgagagggtttgtaccggaagtaccttaaaagcatacgcccccaagcaacggtattttggttaaagtctggagctgattacaaacatgaagtacgattacaaggctgttgaagccaagtggcagaaggtgtgggaggacgaaaagaccttccatgtcgagatcgaccacaaaaaacctaagttctatgcccttgtggagttcccgtatccttcgggtgcgggcctgcacgtcggccatccccgcagctacaccgcgctggacgtggtaagccgcaagcgccgtaaaaacggctacaatgtgctgtaccccatgggctgggatgccttcggtctgcccaccgagaacttcgccatgaagaaccacatccaccccgccatcgttaccaagagcaacgtggatcatttccgcagccagctcaaggcgctgggcttctcctttgactgggatcgcgagatcaacaccaccgaccccgagtactacaagtggacccagtggatcttcctacagctgtacaagcacggtctggcttacaagaaggaaatgaacgtcaactggtgcaccggttgcaagtgcgtgctggcaaacgaggaagttgtcaacggcgtgtgcgagcgctgcggcagcgaggtggtgcaccgcgtcaagagccagtggatgctcaagatcaccgcttatgccgataagctgatcgacggcctggacggcctggattacatcgagcgcgtggccacccagcagaagaactggatcggccgcagccacggcgcagaagtgaacttcggcaccaccgcaggggataccctgaccgtgtacaccacccgctgcgataccctgttcggcgctacctacatggtcatctccccggagcacgccctgctcaaggcatggctggaaaagggcatcatcaagaacgccgatgccgtcaaggcttatcaggccgaagctgcccgcaagagcgactttgagcgcagcgagctgaacaaggaaaagaccggcgtgcagctggacggcgtgatgggcatcaacccggtcaacgagaccgagatccccatcttcatctccgactacgttctgtccacctacggcaccggtgccattatggctgtgcccgcccacgatacccgcgactgggagtttgccaagaagttcggcctgcccatcatcgaggtggtcaagggcagcaccccgtccaatctggacgaggctgcctttaccgatgttgccaccggtacgctggtcaactccggcttcctgaacggcctgtccgtggtcgatgccaaaaagaagatgatcacctggctggaagagaacggcaagggccgcgataaggtcaactacaagctgcgcgactgggtgttcagccgtcagcgttactggggcgagcccatccccatggtgcactgcgacaagtgcggctggcagcccctgcccgagagcagcctgccgctgactctgccggacatcaccgactttgagccgggcccggacggcgagtccccgctggcacgccataaggactgggtcaagaccacctgcccctgctgcggcggccccgctacccgcgagaccgacaccatgccccagtgggccggttcctcctggtacttcctgcgctacatggacccccactgcaaggatgcgctggcctccaaggaagcactggaatactggtctccggtggactggtacaacggcggcatggagcacaccaccctgcacctgctgtacagccgcttctggcataagttcctgtacgatatcggtgtggtgcccacggcagagccttaccagaagcgcactgcccacggcatgatccttggcctgaacccccacagctttgtcaacctgcccgctgaagagcaggagaagctgctcaaggagtacggcagccagaaggccgccgagaaggcactggaagagaagtacggcgagatggcacgccatcccatcgtgaagatgtccaagagccttggcaacgtcatcaaccccgacgaggtggtggaccagtacggtgctgacaccatgcgtctgtacgagatgttcatgggcgattttgagcaggctgcaccgtggcagacctctgccattgcgggctgcaaccgcttccttgaccgcgtgtgggcactgagcgacaagctggtggagggcgagggctaccgccccgccatggagaccctgatgcaccagaccatcaagaaggtcagcgcagatatcgagggtctgaagatgaacaccgccattgcccagctgatgacgctggtcaacgccctgtacgacaacggcggtgccaccaaggccgagtttgagacgctggtgcagctgctgaaccccttcgctccccacatgaccgaggagctgtgggagaagctgggtcacagccacgatgagcagctggcctactatccgtggcctgcctacgaggaagccaagtgcgtggaagctgctgtggagatcgccgtgcaggtgaacggcaaggtgaaggcacgcctgaaggtgcccgcagacatcaccgccgaggacgccattgccgccgccaaggcagaccccgctgtggctgctgcgctggaaggcaagcagctggtcaaggagatctacgtcaagggtcgtctggtcaatctggctgccaagggctgagttttgctgctccgctgaataagcgtgaacatatcatcacccgcagaggcagacctggcgcaggaaacacccggcagcgtctgttcaaaaatctttcaaaagttttgagcaaaaactttcaaaaaaaggttgacgaaccggataaaatgcgctatactgtctactgttagttaccatgtaacaacgaaattcctgcctcacggtccaagggagggaataagatgtcggaaattcgtgttaaagagggcgagtcgctggaaagcgcactgcgtcgcttcaagcgcagcactgctcgcagcggtgtgctcgcagaggttcgtaagcgcgaggcttacgagaagccgtctgttaagcgcaagaagaagtccgaagcagcccgcaagcgcaagttcaagtaattgattgcttggaatcgcacgttgctttagattttaaacgcgttgctaacgccgatgtaggggagcctgtttatgcaggttcccctattttcattttaaagctgctttgcgcagggcagactgagagggtctatttatgctcattacccccgaatatgtttttaaggacgttacccatatcacgccggaatggcttgccgccaagggcatcacggctctggtgctggatatcgacaacaccttgaccgcagaccgcagtcaggaactgccggaggaggtggccgtgtggcttgacaccatgcgcaaggccggggtaaagctgaccatcgtctccaacggtgcggaaaagcgggtgcgcccctttgccgaaaagctgggtcttgcctacctgtaccgcgctgccaagcccctgccttttgcgctgatggtggcgcagcaccgcatgggggtgaagcaccgccagatggccatggtgggcgaccagctctacgccgaccgcatggtggcggcgctgtacggcatcccagggctgatggtcatcccccgcgggacggacttgggcgcgcaggtcatcctcaagcgcaagtgggaaaagaaacactggcagaagtactacgaccggggaggtaagaccctatgagtgaagcttggaacatccggttcggcactgcaggcaccagcgacagctttgccgcccaaggctacaaaagcagcttggatgtgccggagtacaccgccaaaatgggactgaatgcctttgagtaccagtgcgggcgcggggtgcgtctggggctggataaggccgcccacatggctgcccttgctgcggagcgggacatcctgttcagcgtccacgcaccttattatatcagtatgtccagtctggaagaggacaagcggctgaacagcatccagtacctgctgcaaagcgcggcggtgtgccgggcgctgggcggcagacgcatcatcttccattccggcagctgcggcaagcagagccgggaggcggcgctggaaaaggcgctggataccatgcgccgcgccgtggctgcgctggacgaggctggctttgaggatatgaccctgtgcccggagaccatgggcaaggtagggcagctgggcacgctggacgaggtgctggcgctgtgcggcgtggacagccgcatcaccccctgcatcgacttcggccacctgaacgcccgcacgctgggcggcatccagaccaaggcggactatgctgccattctggaccgcatggccgaggtgctgggcgatgaccgcgcccggcagttccatgtgcacttttcccgcattgaatactcggcgggcggcgaaaagcgccactggacctttgccgatacccagttcggcccggagccccagcccctgatggagctgctggcacagcgccagctgaccccggtggtcatctgcgagagtgcgggcacacaggccgaggacgcgcagacgatgcagcaaatgtaccgcgcagcgcggaatgtgtaaaagattttgtgtttttatcgtcttttttgcccaaaccccttgccaaacaggggcagattgggtaaaataaatagagatatgcgttaagcatctgagattaaatttatggaggaattcctatgatttctgcaggcgagtttcgcaatggcgtgacctttgagcaggacggtcaggttcttcaggtcgttgagttccagcacgtcaagcccggcaagggcgctgcctttgtccgcaccaagaccaagaacgtcatcaccggttctgtggtcgagaccagctacaaccccaccgctaagttcccgcaggctttcatcgagcgtaaggacgtgacttacagctacgaggacggcgatctgtaccacttcatggacaacgagacctacgatgacatccccgtcaacgcagccgacgtgcccgataacttcaagttctgcaaggagaacgagctgtgcaagctgctgagctacaagggcaaggtgttcagcgtcgagatccccaacttcatcgagctggaagtcacccagaccgagccgggtgtcaagggcaacactgctaccaacaccctgaagcccgctaccgttgagaccggtgccgagattcgtgtgcccctgttcatcaacgagggcgatcacatccgcatcgatacccgcaccggcgagtatatggagcgcgtctgatcatttgtcgcataccgggcagcgggcaaccgtttgcccggtttttgtattacaaacaaggagggcatttcagatggaactgaacaagaaagcagcctacctgcagggcttagtggacggtctgggcgtggatgagagcaccaaagagggtaagatcatcaaggccatggccgctctgctgggcgagatggccgatgccattgccgccatggacgaggatctgacccacgcctacgaccagatcaacgatctgagcgaggagctggaggatctggaagccgacctgtacgaggacgaggatgccgaggacgaggacgacgacgcagccgacgaggatgaggatgcgggagatgacgacatcgctagcgagcccttctacgaggtagcctgccccgcctgcggcgagactgtctacgtcagcgaggatgatctggatgcaggcgaagccaactgcgcccactgcggtgtgacttttgaggtcgcgctggaaggcgacgaggacgaagccaaggacgcccccgtgcagtacgaggtgacctgccccgcctgcggaaagaccgccgtatttgaagaggacgagctgctggacggcgcacccaagtgccccaactgcggcgagccgctggactttgaggtgaccgaggagtaagattttctcttattcttgtgaaaatgggatccagaaaatagcgctttttgctgctgttttcctttacgaccccgctcgtgaaaaggcaattttggaaaatccgcagattttccaaaattgtaatctaaaaagaaattcctatgaatatggccaaagcgcacgcggaggccattccaaattgtccctataaaaacgcaatgccgggcagtccgcagactgtccggcattgttcattttaatttgattcagcgggtctcattggccttctgcagccagatgccgccaatgtccagtgcgttgtacaagccgtgcttggtggtctggcgcgctacgcgctcctgcggtgccttggtggtatcggtagaaagcagcatcaggtgtaccttgtcggctacctgctgctcgcccaccggggtggtggtcaggatctgcagatacagcacatagggatcggtcatgctgccgtaatacagctcgttgtccttgcggacgaggggcttgcctttataagtcagtttcggtgtatatgccatcgtgaaagcctccctgtcgtttgattcatcctagtataacacattctgcctatgggatgcaagcgtttgcggcagtgctctgtcagttttgcaccaaaacagccccgtaccgtgcaaaaccggcagcacatttttggcaaatggggttgctgttgggtgcagttatgctatactataaatagaacagcccgcattccgggccggaagtgagggaacgacaatggcagattatcaggaataccggcggcgcatcctgcaccggcgctggcgcaggatgtttatcatcgtcgcccttctggcgcttctggcgcttctggctctgctgagcgccatcggcattctgtggaaggtgctgcaccgggagcgcgtggataccgccctgagccaaaacaccattctgcggcaggtgaccacggacaacacatggaacacagtcagctacccgctggcgcggcagctccgggtgcagacgctggaggacagcaccgagaccgcgctggacttccgcatggcggcgctgccggccagcgctccggtggaaaaaagctggtttgcgcaggtcagttttgtgggcgacagcctgacacagggcttgcagatctacgataccggcctgcccggggcgcagttctgcgcctataagggggtaggccccaacgcctttgtcaacggcaccagctgcaaacgggtggacggcgtgacagagatcccgctggacgctttgaccgcccagcagcccaaggccgtctatgtgctgctgggcagcaatgtgctgggacgggacaccgattacaccagttttctgacctactaccgcctgatgctggatatgatcagtcaggcgctgccggatgcaaagatctatgtgcagtccatcacgccggtaaggccggaggtgagcgcacaggaaaaccacgcagggctgaaccgcgaccgcctgtgccgcatcaacaacgagctggccgccattgcgctggaaaaggactgctacttcctgaacctttgggaggtactggcagacgaaaacggcgacctgatcgaaagctacgcccagccggacggctaccacatcaagccggagggctacgccgcatgggtggactacctttgcagccacaccatggagtgaaaaaaacaaaaggctgctgcacggaatctgtgcagcagcctttcttgctgtgtgggacgatttggaatgccctccgcgttgctctgggcatcttcagcggaaaaaatatttttatatttgtggttcagaaacgcctgcgggcgtttctgaaccactttttcacggagaaaagctgttaacggaagcggcaccttctgtgaaaatgcgtttgtcgcggcccgcaggccgcgacaaacgcaaaatatcaatagggattccgctaaaaaatggtcagagcgaagcggagaccattaaaatcgttttgctgccaaagggcggagcgcgccagctcagaacaggccggtgatcttgccatcggcgtccacatcgatgttcacggcggcgggctttttgggcaggccgggcatggtcatgatgctgccgcagatcaccaccacaaagcctgcaccggcggccagacgcacctcgcgcacctccatggtaaagccggtgggcgcaccggtcagcttggcgttgtcgctgaagctgtactgggtcttggcaatgcagacgggcaggtcgccgtagcccatctcggtcagctcggccagcgtcttgctggcggcggcgctgtagtttacgccatcggcgcggtagatcttggtggcaatggcgttgatcttgtccttcaggggcatctccagcgggtaggtgtactggatgggacgatcctccagaatctcaagcaccttctcagccagtgccttgccgccctcgccgcccttggcgaatacctcgctcagcacgcagggcacgccctgctcggcgcagacctgctccacataggcctgctcctcggcggtgtcggtggggaaggcgttgatggcaaccaccaccggcagaccgaagccgttcttcaggttgtcgatgtgacggatcaggttggaagcaccggccttgacagcttcgaggttgggctggttcaggtctgccttggctacgccgccgtggctcttgagggcgcgcacggtagccaccagcacacaggcagagggggcaataccggcatagcggcacttgatatccaggaatttctccgcgcccagatcggcaccgaaaccggcttcggtgatggtgtagtctgccagcgaaaggctgagcttggtggccagcacgctgttacagccgtgggcaatgttggcaaaggggccgccgtggatgatggcggggttattctccagcgtctgcacaaggttcggatccagtgcgtccttcagcagggcggtcatggcaccggctgcgccgatctcaccggcagtcacaggcttgccgtcgtaggtgtaggcgcacacgatgcgggacagccgctctttcaggtcggagatgctggtggcaaggcagaagattgccatgacctcgctggcgaccgtgatgtcaaagccgtcctcgcggggggtgccattcaccttgccgcccagaccgtccacgatgaaccgcagctgccggtcgttcatgtccatgcagcgcttccaggtgatgcggcgggggtcgatattcagctggttgccctgctggatgctgttgtcgatcatagcggccagcaggttgttggcggtgccaatggcgtgcaggtcgccggtaaagtgcaggttgatatcctccatgggaaccacctgtgcatagccgccgccggcagcgccgccctttacgccgaacacggggccaaggctgggctcgcgcaggcagagcatggtctttttgcccagtgcgttcatggcatcggccagacctacactggtagtggttttgccttcaccagcaggggtggggctgatggcggtgacaaggatcagcttgccctgctttttggcggtgtggatcagccggtggtcgatcttggccttatagcggccataggggatcacactttcctcctccagacccagctgagctgcgatctgggtgatcggcttcattttggcttcctgcgcgatctcgatatcggtcttcatacagacatcctccttgatagcaaaaaaggacagctttgcgcagcaattgcgcaaggctgcccagacggtcggcattgacatcccatgcacccctgcactgtggtgctccacaaggttccgtcagcagggatgcggtctatgctgtaaagatagcacaccaccggggtgtttgtcaaggaggtacagttacaaaaatcacccataaatgcataaaattttttgcgttatccaagggtttgtgctatacttattctgggttattatgaaaacaacgacagaaagcaggaaatccgtttatgctgcaaaaccctcagttacattatctggacaacgcggccaccaccatcgtagcgccggaggtggcggacgtcatcgacaaggccatgcgggagcactgggcaaacccttccagcttatacggcccgggcgcgcgcagtgaggaggctttgaatgccgcccgcgccgccgtagcgcgcacgctgggctgcaaaagccgggagctgtattttacctcctgcggcagcgagagcaacaatctggcgctgctgggtgcggtgcagacccgcaccttcggcaagggcatcgtggtgtccggcttcgagcaccccagtgtgcagcgcccgctggagcggctggcaaagcagggctatgatgttaccgtggtagccccccgggcagacggcacgttggatattgccgccatgctggagcgggtggacaaaaacaccatccttgtagcctgcatgatggtgaacaacgagatcggcacccgcaacgatgtggagcgccttgccgccgaggtgaagcgccgcaacagccgcaccatcgtccatgtggacgcggtgcaggcgtggatgcgtgtgcccatcaagttggacaacatcgatacgctctcggtgagcggccacaagatccatgctcccaagggcattggtgcgctctacctttccgaccggctggtgcaggccttccagccgccctatctgggcggcgagcaggagcggcagatgcgccccggcaccgaaaacctgccctacgccatgggtctggccgcagcggccacccgcctggccaagaccatgaaaagccgggacaccgccatgcgtgcgctgaaccggcagctgcgggaggggctgaaagccttcccggaggtggtcatcaacagcccggagaacgctgtgcccgaggtgctgaacttcagcgagatgtgcatcaagagcgagacgatgctggcttttctggccgaggagcagatctacgtttcctcggccagcgcctgtgggcgcggccagcccagccacacgctggcagccatggggcgcgacccgcttgccatcgacactgccatccgggtgtccttctgtgccgataacaccccggaggatgtggatgccttcctcaaccgcttcgaggacggcatgaagcacttgcagaagattcggaaataactccttcagtcacggctacgccgtgccagctccctcaaggagggagcctttggatatagcggacaacttttccgctatgccaaaggccccatctcagagggggctgtcaccgaaggtgactgggggagttccctcagaaagttatctattataaatcccacatcaggagatgcaacatttatgaaggaaattattatgggctatcagggcgagatgtccctgaaaggtctcaaccgcaaccagtttgaagcagccatgatgaagatcctgcgctaccgccttaagacggtgggcaagttcaaggtgtactgcacccagtctaccttttatatggagcccgaggaagaggacgtggacatggatctcgcctttgagcgggtcagcaaggtgttcggccttgccgcgctcagccgcgccgtggtgtgcgaaaaggatttcgataccatctgccagaccgccgaggactatctgggcagcgcgctgcacggcatccgcaccttcaaggtggaagcccggcgcgccgataagacctaccccatgaccagcccggagctgatgcgggagctgggcgcttacctgctgggcaagcacaactacctgaaggtggatgtgcataacccgcagtttaaggtcattgtggagattcgtgattacggtgcgtatattcacggcccgaaaataccgggtgagggcggtctgcccgtgggtaccagcggccgtgctctgaatatgctctccggcggtatcgacagcccggtggcagcctatcgtatggcaaagcgcggtctggcactggatcacatccattttgcgtcccctccgtatacttccgagcgcgcaaaactgaaggtaaaggctctggcacagctcatcaccgtgtataccggcagcgccaacctgtttgtggtgccctacacaaaaccccaggaatacatccgggataacgccccggatgtgctgttcacggtgctgatgcgccgcagcatgatgcgcattgcaaacgtgatcgctaaaaagcaggggtgcgaagcgctggtcaccggcgaaagtctggcacaggtggcaagccagaccgtcaaggctttgcagtgcaccgatgccgcacaggatctgcccatcctgcgcccgcttatcggcatggataagaccgagatcatcgagacctcccgtcatatcaatacctttgagaccagcatcctgccctacgaggactgctgcaccatcttcaccccgccgcacccgaagatccgccccgagctggaagaaatccttgccgccgaagccgccatgcccggccttgccgcgctggaagccgaagccgcagagcagaccgagcgcatccgggtgcgcatcaccgatcaggtagaattcgagggttgatttgtccatgacagcagagatcatcagtgtgggtaccgagctgctgctcggcaacattcttaacaccaatgcccagtacctcagccgggagctggccgcgctgggcatcaccgtccggcggcagagcaccatcggcgataaccatggccgtctggcagattttgtcaacgaagctaagcagcggtgcgacctgctggtgttcaccggcgggctgggccccacggcggacgacctgaccaaggagacggtggccgcctgctttggcgacacccttacctttgacccggacgagtggcagaagatcgtggacttctttacccgcaccgggcgcgagaccacccccaacaaccgcaagcaggccatggtgccggtgcacgggcataaggtggtcaaccaccacggcaccgcgccgggcgcatggttcgagcaggacggccgctgcgccgtactgatgcccggtgttccccatgagatgaaggccatgtgggaggaaagtgtgcgcccgctgctgctggcgcggcagagctgcgccctgcacagcctgacgctgcgggtgctgggcggcgagagcaatctggaataccgggtgcgtgcgctgctggaaaaccagaacccaaccgccgccatctactgcaagaccggcgagtgcgagatccgcatcaccgcccgggcgcagaatgacgccgaggcgcagacgatgtgccgcgcctacgccaaaaagttctatgatctgctgggtgatgcggtgtatgatgaggatgtcgccgggttagaagagacggtggtgcacacgctgcaggccaacggcctgaccattgccactgccgaaagctgcaccggcggcatgatcgcccagcgcctgaccagtgtgtccggcgcaagcgaggtgttcggctacggctttgtgacctactgggagcaggccaaggcgaagcttgtcggggtagacccggcggtcattgcgcaatataatgtggtgtcggctcccgtggcggcgcagatggcgctgggcgcggcaaaagccgccggtgcggatatcgcggtcagcgttaccggtctggcgggccccggcggcggcgatgccgtccggcctgtgggcacggtgtatctgggcgctgcccggggagacaaggtgtatgtgaaaaaactgttcgtctcccgcccggaccgtgcgctcatccgcgcccgcgccgcacagactgcgctggaactggcgctgcgtctggcacagggcaagaccccggccggtacgcaggtgctggccgaaagcgcacagcatgaccccgccgccctgaccgccttggacgagaccctgcgggcagagtgagagcggcccctgcggccgcaggggggatgcgtcatgacaaataaggaagagcgcccggcaggctgcgtgctgcggttgttcggtgtgccggagcagaccgtgcaaaaggcagtggaaaccctgccggacacttggcagggcacggtacactgccgcacccggggtgcggaaacgctggtggcgctgcaaagcagcaccccgcagcagttgcaccgggcggtacagcagttgcggacaagccttgccccggcgctgtacggggaaggagagcagacccttgccgccgccgcagtgcaggcgctggaacagcaccgcaagcttttggtgtgcagcgatgccgccgccggggcgctgctggagacccgactggaaaaccttcccggcgcagaaaaagtgttcgattttggtgctatgagctacgccaatgccgcactcaacgcccggctcagccgcaagctgcgtaaagcaccgcaggcagagcctgtccgcacactggcgcgggtgcaggccatgcagcggctgaccggtgccgcgctggcggtgggctgtgtggaactgccccacagtcggctgttgctggtgggcggcaaaaagggctgctggctgcggtgcgtatcgccggacgagaaccccgggctgtggctgctggatatgctgcgccgcgctgcctgcggtctgccgcaggcagggggcacaagctggcagccctacggtaaagcagtaccggatacagctctgatgcctgccgccctcacggctgtaccgctcgtgccgccgcgcccgaagcgccgcaggttgggcaaggcgctggcagtgcttttgctgctggcactggcagcactggctgcgggctggtactataccggcggcgaccttgccgccctgccccaaaagctgcaaagtcttggtgcagaaagcctgccccacgccggggcaaggctgatataacaaaaaaagtgccggaaacgatcaaggtcgtttccggcacttttgctgtttactggtgatctgccagccagcgcagcgccatataggtgtaggctgctgtgccgcggtacaggatgctgtcgtcaaagcgcactttggggtggtgctggccgtaggtgtagccctccttggcgttgcctgcggctaagaacatactcacggtgggcacttcatggctgacaaaggcaaaatcctcactgccgccgccgggcttgccgccggtgagcggggtcatgtccatagcgcccttgcccagcagctcggtcatataggtcagggcattgcctgccagcggggtgtctactaccatgcaggggcagtaatcgctgaactccacctcggcggtgcagcggtaggcggtggccacgccctgcgcaatttcggtcatgcgctggtggataagggcgctgaccttctgctccgggtctacggtgcggatagtgccccacatatcggcagtatccgggatgacattggaagccttgccggcctcgaaccggccggtggtgaatacaccgaacccggcggggtccagttcgcggctgttgatctcctgcagggcaatgtggatgtgcgctgctgcggtgatggggtcgatgcaggcgttgggcatggagccatgcccgcccttgccgtgcacaacgatgtggtactgctcgcagctggccatggtgatgccgccgcccggcaccagcaccataccggcgggcaggggcatcccggccagcacatggaacatgaccgctgcatccaccttggggttctccagcagaccgctgcttatcatatccagcgagccctgaaagatctcctctgcgggctggaactccagctttaccgtgccctcgatctcgtcctcgtgctccttgagcagcttggctgcacccagcaccatggcggtgtgcatatcgtggccgcagccgtgcatcttgccgggcagctcagaggaaaactcctcgccggattcctcctgcaggggcagagcgtccatatcgccccgcagcaggatcaccttgccggggcgcttgccccctgcaagcgccaccacgccgcacttgccgcagtcctgcggggtgtagcccatctcggtcagcgcctttttgaccagtgccttggtctggggcaggtcaaagcccacctccgggtgacggtgcagcgtgcgccgccactcctgcagctggggctccagcgccttggcggcttccaacagtttttccggtgcgatcattgtaaaatcaactccctctgaatttatgcggaaaaccctctcggccacggcagggagggctttgccttacagttattcttccccgccgttattgccattggggtggtactgggcgcaggtgcactttttgaacttcaggccgctgccgcaggggcaggggtcgttgcggccaattttgaccacacgcaccggctgacccttggggctgcccttgacgccgggtgcaccgttgccgggcacaaaaccttcgccggtgggctttgccacctgctcccgcttgggagcggaaccggcggcgcgcagttcgatggtcagcagcatcttgacgctggactcccggatggaatccaccatctggtcgaacatatcaaagccctcgatgcggtattccaccaccgggtccttctggccgtagccgcgcagcgcgatgccctgccgcagctggtccatgttgtcgatgtggtccatccactggcggtctacgcacttgagcaggcagatgcgctccagctcgcgcataacgggtgcgccgtagcgcacttccttggcctgcaggatctgcatcccgcggtcgtacagcatatcggcaatgccctgctgggagagattgtcaaagtccgccacagtgtagtggaagtcggcatcggtggtcagccagccctgatagtggcggcgcagcgcaccaaaatcccactcgtccttcacatcgccggaaaggaactgggcgcagctggaatcaatgttctcccgcagcatcttgtgcatctcggtgctgatgtcctcaccgtccagcaccttgcggcgctgcccgtagatgatctcacgctgctggttcatcacatcatcgtacttcagcacgtttttacggatctcgaagttgcggccctccagcttcttctgggcgctttccagcgtattggtgatcatgcggttctcgatgggggtgtcctcgtcgatcttcagggtgttcatcaggccggacacccggtcgccgccgaacaggcgcatcaggtcgtcctcaaggctcaggtagaagcgggaagcgcccgggtcgccctgacggccggcacggccgcgcagctggttgtcgatacggcggctctcgtggcgctcggtaccgatgatgaacaggccgcctgcggcgcgcacctcgtcggcttcggcgtcgatggcgggcttgtactgggcgtacagctggtcaaaacgctgacgtgccgccagaatgttggcatcggtggtctcgccgtggccgttggcttcggtcagcagcagctccacggctgccgggtcggcatcctgcggggtgtcggggttgagcaggttctcgcagaagtgctccttgcgcatctgggcctttgccatgaactcggcgttgccgcccagcatgatatcggtaccgcggcctgccatgttggtggcgatggtgatggcaccctttttaccggcctgcgctacgatctcggcttcgcgctcgtggttcttggcgttcagcacgttgaaatcccgggtgtggcgctgtaacattttggcgagcgtctcactcttttccacgctgacagtacccaccagcacgggctggccgtttttgtggcactccatcacctgctcgatgacggcgcggtatttgccctccacagtcttgtagatggcgtccgggtagtccttgcgctgcaccgggcggttggtgggcacactgacgatgttcaggccgtagatctcggtgaactcggtggcttcggtgcgggcagtaccggtcataccggacagctttttgtacatacggaagtagttctggaaggtgatggtggccagcgtcttgctctcggcggcgatcttcacgccctccttggcttcgatggcctgatgcagaccctcgttgtaccggcggccgatcatcaggcgtccggtgaactcgtccacgatgatgacctgaccgtccttgaccacatagtcgatgtcccgctgcatcacgccgtaggccttgatagcctgatcgatgtggtgagcaagggtcatgttctcggcggcggcaaggttctctaccttaaaataggcttcagcctttttgatgccggcagcggtcagggtgcaggtcttgtgcttttcgtccacaacgtaatcaccatcggcctgttcgtcggtggagaccttatcctccagctccaccaccacgctcttgtgcagggtgcgcacaaagcggtccacctgcgtgtacaggctggaagaatcctcgccgcggccggagatgatcagaggtgtgcgggcctcgtcgatcaggatggagtccacctcgtccacgatggcgtaggcgtggccgcgctgcaccatgttggccttgtaggtcaccatgttgtcgcgcaggtagtcaaagccgaactcgttgttggtgccgtaggtgatatcggcgttgtaggcatcccggcgggcgtcgccgtccatgccctgcacgatcagaccaacggtcagccccagccagcggtagagcttgcccatccactcgctgtcgcgcttggccagatagtcgttgacggtaacgatgtgcaccccttcgccggtcagggcgttcaggtaggcgggcagggtagccacaagggtcttgccctcaccggtctgcatctcggcaatatcgccgcggtgcagggcaatgccgccggtcacctgcacggggaaatgcttcatgcccagcacacgccatgcggcttcgcggcagacggcaaaggcatccggcagaatgtcatccagcgttttgccctcggccagctgctgcttaaaggcggcagtctgcgcctgcaagtcggcatcggacatggcctgatacttgggttccagcgccagcacctgtttggtgatgggatttacctttttcagctcccggtcagagaagctgccaaaaagtttttcaacaagggacataggtcacacctcataaatcttaaaaatcgggctgtgatgcgcccgggatcgcgcataacaatacaagtatatgatacaccaaagcggcagacacgtcaaacctgcaaggctattttagcccgcttttacatgaactttctgtaaaaagatgctgcaggccgttcacagttccccgataccccggcagcacgctttattttcgccctatcgcttttgggggaatcgtggtagaatagggctatcattgatagggagggctgtacttatgctcaaacggctgcgcaccgcgcaccccattctttattgtatcctgtccgaggtgctgttccttggcagcatggtcgtgttcagcctgctggctaccatcgtgctggcagcggcaggcgcggactttgataccatggacggctatctgtttggctctgtgcaggaagctgtcgggctggcggtggcacttttgctgctggcccgcaccggcaggctggatctgctgcgccggcgcggctgcggctttctgaacgggctgctggtggggatgtacccgctgttcttcatcgggtacacgttttttgggacgctggcctttggccgcccggacacgccgctgctgccgctgccccgcatcctgacttttttgctgaacatgatccttgtgggcgtggccgaggagctggtgttccggggcatcattgcccagaccctgctggagcgctacggcaccgcccgcgccggggtgtggaaagcctgccttgtgtccggcgtgctgtttggcgcggcgcacctgagcaacctgctcggctcggcaccttttggcgtgctgatgcagtgcgtgtttgcggcttcgctgggcgtgatgctggccgccatctacttccgcaccggcaatttgtgggtaacggtgttcctgcacagcgccatggacattgccgccatgctcatcggcgggttgtacggcaccaccagtgtggccgagagcgtaagcggctacgatgcttcgcggctgctgtcggtggcggtgtacctgatccccaccgtgtttctgctgcgcaaaaagaagctgccggaggtgcagctgtactggggcggcattgtaaaaaattaaggcttgcggacaaaaatcttcttgcaatctgctgtgcaatctggtatactgtatctgttaccgtggcacggggctgggagtatgcccgcttttgggagaaccgtttcccgccgctgtgccataggcagataaattacttgaaagaggtactgtattatgaataagcaggaagttatggccaaagtcgctctgaccgagaaggacactggctcccccgaggttcaggtcgctctgctgactgctcacatcaacgagctgaacgagcacctgaagaagaaccctaacgatcaccacagccgccgcggtctgctgaagatggttggccgtcgccgcaatctgctggcttatctccagaagaaggacatcgagcgttaccgtgctctgatcgcaactctgggtctgcgtaagtaattttaacggagggcaggtaccgcaaaggtacctgccctttgctttatgtatagctccatgtatcccatgcgcacaaaatagcggtggcagcgtattgcagcagtaaatcgaacgcccgtgcctgcgggcagggacgctggatttattgctataatgcgcacgccacggctttttggatagaacgatccgaaaaacaaggaggcagaaacaatggcaatcgaatttggttcccgcaaagagacctttgacaacttcaaggtctacgaaaccatgctggccggccgcccgttcaaggttgaaatgggcaagatgtgtggcctgtccaatgccagcgcactgatccgctacggcgagacctgcgtgatgtgcaacgtggtcatgagccccaagccccgcgagggcgtggatttcttcccgctgaacgtggagtacgaggaaaagctctacgccgcaggccgcattcccggcagctttatgcgccgcgagggccgccccggcgagcgcgccatcctgaccagccgcgtggtggaccgccccatgcgcccgctgttccccaaggagatgcgcaacgacgtgtgcatcaccatgaccgtcatgagccttgacccggattgcagccccgagatcgccggcatgatcggcgcttctctggtgaccgccgtgtccgatatcccgtggaacggccccatcggcggcgtgcaggtgggcttggtggacggcgagatcgtgctgaaccccacgcaggagcagcgcaaggtgagcgaccttgccctgaccgttgccgccaccatgaacaagatcgtgatgatcgaggccggcgccaacgaggtggacgaggacaccatgctgaccgccatcaagaccgcacacgttgagatcaagaagatcatcgagttcatcaacaagatcgtggccgagcgcggcaagccgaagatcgacttccaggtggtgggtctggacatggacgtgttccacgccatccagaacaagtatctggacgacttcaaggccgctatggacaccgacgacaagaatgtgcgtgacgcagccctgctgcccatcatggacaagatcgccgaggaataccccgacctgtccgctaccgatctggatctggtaagctacaagatgcagaagttcgtggtgcgccgctggctgctggatgagggcaagcgcgtggacggccgcggcatcaacgagatccgcccgctggccgcagaggtgggcatcctgccccgcgtgcacggctccggtatgttcacccgtggccagacgcaggtgcttaccacctgcacgctgggcggcaccaaggacaaccagctgatggacgatctgaccgacgagcagaccaagcgctatatccaccactataacttcccgccgtattccgtgggcgaggcacgcgcaccgcgcagccccggccgccgcgagatcggtcacggtgcactggccgagcgtgctctggtgccggtgctgccctctctggaggagttcccctacaccatccgctgcgtgtccgaggtgctcagctctaacggctccacctctcaggcttccatctgcggctctacgctggcactgatggacgcaggcgtgcccatcaaggctccggttgcgggcatttcctgcggcctgatcaccgagggcgagcgctggatgaccatgctggacattcagggcgtggaggacttccacggcgatatggactttaaggtcggcggcacccgcaagggcattaccgccatccagatggacatcaagatcgacggcctgacctacgacatcattgccgaggccttcgagaagtgccgcaagggtcggctgtatattctggacgagatcatcaagccggtgatcgcccagccccgtcaggagctgagccgctgggcacccaagatgttcagcatgatgatccccaccgacaagatcaaggacgtcatcggtaagggcggcaaggtcattcaggacatctgcgccatctgcaactgcaagatcgacgtgcaggaggacggccatgtgttcgtctccgccgtggatcaggaggacgcaaagcgcgccatctttaccatcaagaccattgtggaggatcccgagatcggtgccatctacaagggcaaggtgacccgcctgatgaactttggtgcctttgtggagatcgctccgggcaaggaaggccttgtgcacatctccaagctggacaccaagcgcgtggagcgggtagaggacgtggttgccgtgggcgatgccatcgtggtcaaggtgaccgacatcgaccagcagggccgcatcaacctgagccgccgcgatgccattctggcactggaagccaaaaaggccgcccagcagcagtaaaacataatacggactgcataaatcaagagccgctgtacagaacgtacagcggctcttttgcgtgtaccccctcagtcaaaccctgcgggtttgccagccatgccgggaacgggctcgccctctccgtcatcgctgcgcgatgccacctctcccaaagggagaggccttggcagtacggtaaagtttctggttttgccaagggctccccctttgggggagctggcgcgttagcgcctgagagggcgagctcgctttgtgctgtggtacagccttgcggcaacaccccctcccgtgaaaaggcaatgctggaaaatccgcagattttccagcattgcaaatttaaaaatatatttccgctgatgatgcgcagagcaacgcggagcgcattttaaatcgtgccgtgcccggcagggaagagggcataaaaaaactcccccttgcgggggagagggcacggcgcgccgtgctggaagggagtagggttcagtgttcctttttgccctgacggttcagcacccagccgacggcaaacagcagcacaccgctgcaggccagcaccggcacaggccagttcagctgaccggtctggggcagaacgggcttatccgggttagaaggggagaccgggttatccgggttctcggggcttacgggattgtccgggttgccgggacttaccgggttatccggtgtgccggggctcaccggcgtatccggggtgtccggctgctccggaagatcgggggtgtccggcggcgtgtccggcgtatccgggggagtgtcaggggtgtctgggggcgtttcgggggtgtccggcggggtctccggcgtatccgggatggtagcgcctaccttgggggtggcgtccacatcgtagatccagctgtcgccatccggcaggggaatggacacaaggaagggcttgatggcttcgtagccgtgggaagcctcggtctgcatgaccagatacagcccctgcggcagcttggtaaagtcggcgtagccttcctcgtcaacgttctgctgggcggcaacggcgggcacggtgggcagatactttgccagctggtcagccagcgtgctgtcggaaaggtcgcccagcggcacgccgcagcccgtaaaatcgccggtataggcgtaggacaggttgccgccggtgcgcttgacggcggcaacctgatacaaggtcagctcgccgccgcgcaggggcacatcgttgtgggtgtcgtacagacggacgtggagcgagcccagccgcccggacacaaggctggcactggtggcaaacgccggcagggcgcagcataccacaaggcacacagccagcagcacagctgccagacgatgacgcagatcaatgcttttcatgttcttcacctcttgttttcttgcgtttgcgtgtggaaagcagcataccgatcagcaggatcagcagcatgggcagcgccatgacgggcgcaacgatgataggctctatcttgagcgcttcggcagtaacacggatgtgcttgtactgatccggggtctccacgcggtggccgcgtaccagcaggcggtgggtgttgatgccgtagggggtgcaggtcatcagggtgacgtaatccttgccttcggcgatcttcagctcgtcggtctcggtgggcagcacgatggaaattttgtccacctcgtaggtgagcacccgatccagcacggtgatggtaaaggtatcgcccacttccagctggtcaaggttggtaaacagctttgcgctgggcaggccgcggtgcgccgagatgaccgcgtgggtggacgcgccgcccaccggcaggctggtgccctccaaatggcctgcggcgatctgcaatacgctgtcgctggtgccgtggtagatgggcagctccacgcctattttggagatggtgatgtaacccataatgcccgtgccggtaatatccagcgtgtcggcgtagccagtaagctgatccgggcggtagagcgcgtactcgttggcggctacctgtgcgttaaaggcatcggcggcgtcaaagtatccgctgtaatccgcatcggtcatgttgtccacgtcctgcgcgtagcttgccaccgcgcgggactggttgcgctggttgacgtaatcgctgatggtggggtataacatcacggatagacccacgaaaaagacgaggatcaatataatggtgcttttgttctttttcatgggctactccctaacgttatagtttcaggaccagagcagggggctttacagccccgctctgtgcaggggaaaaggagagcttagtggttctccatgcgctttttggtaatgagcaggatggctgcagcaaccatcaggccgccgccgatcacatagaagatggtggtgccgatgccgccggtgccgggcagggtagtgccggcgttgttctcaacattaaagcccacaccgctacaagcattacttccgttgactacgacattcggctgagttgcaatataattaccggtaatatcataggtgttgtcaatgatcttaatctccaccggagtggtcaaaacattataaccaccgggtgctttggtctcgtacagataatatttggtctggtcatcaagacccttgatggagatctgaccgctagcaggggtagtcatggtataagtagtagcggtagtggtagtggtagtggcaactgtataagtgccattattgttatctacgagcttgatcagtttgtccagatttttagtgggagtaccgtccttgccgggctccagatccaaaccgttcgccttggaaagaacgaacactgcaccctccagcttcatgtcgggatttgcaccgtcaaccttggtcatatcgaccttgaacgtccagtcatagaccgtctttttaggagtctcgccagtaccaacgtcgttaggattgttgctgtacaccagatgagcttcgttttgctgaggaccatcagggtataccttagcattttcgttcagaacgccgtcataataagtgtagagcgtattgccaacggcaaacttattatctttaatggcttggatgatatcaacaaaaacggtaaatttgttgctattggtagaatcaaccgtaacactgtagtaagtagagttcagcacagtggtatcattgactttaatggtaatgtcagaatcggtcttgaccttagaggtcagctccggggacatggtatcgtgaatctcataggtgtagtcagtgtaaccggtagtatcaggaacagtggtaatagtgcggaactcaacggtatcaccgatctggttgtcgccaacaacaccccaatcaccggtctcattgtgcctgatctgcttgtcgagcgtgacagtggtgtcctttgcttcgatggtaaggctctgcacaatgttcagcatataacggctgtaggttgcaccagcaggcatagaagcagaagcagttgcgtccttgatgaagtagtagccatcgggcaggttgttaatggtataagtcataccagcttcagtagaagtgtacttatttgcagtgaggtgcttgctgacgacctcggcaaaagtgttgacatcgtcagagctaggggacagtttggcgagctcggcagcaagtgcagccgcagaagagagacctttcagagaggaaggcaagtcaggatcattacgaatgtcatcgccaataacgccgttaccccaatcgatgttactcagaaccttgcctttcaaatcgccggtaaacacctgataggcttcataggtatgacctgccgttttaccattgatcgtaagcgtgttgctgccagtaccagctgcaaacgccgggatcgccatggcgcaaaccatagcaactgccagcagcgcagccatgagtttcttcattgcttttttcatggaaaaagcccctttcttttctgccccttgccgccccctgcattttgcacaggggggggggtaggggtgtagttttgttcggactatcgcgtaaactttgcgctgggcgggcggggtttaagctccgggcgtccggcagggaagtgcagtttagtcatctgccctcccttcgcgtctgcgcttgcggtggataaagctgtatgccagcgcagacagcatcattgtgccgcccacggctgtgtacgggagtgtaccggacccgccggtagaggggagttcgtagttagcatcctcgggcacctgattgtaaagcaggatggtgccgccggtgatgccggtgttgttcaggtcgtatttaaacgtaccggaacaagctgtttccttaacgtagtacttgtaggtgatactgctgtcagcgggatcagtcaaaggaagattgttccagctatagctccagttgttggaactatccaaggtgacggtggtatacagttcatcattcggctgcaagttgccccactgatagaccttgcgccgcagctctacggttgcggtgtaggtggagttgaccttgttcggagcaagctctgttttgccgtccgtatccagccaatgcttggcaaccgtaatgctgttagcggtgttgggcacatatacagcactgatatcaccacgggcaaggtaggtcacatcgttgcagttaagcaatttatcgtactccgaagcatcatggatataagattcaccggtagcagcattaaacgcgtcagctcgctttgtgttggaaaatgcaccccacagcaggtagatcgggctcttgctaagcgcatagccggtgggggcatccgtctctacaatacggtagagcgtactgcaaagcagctgggcactgctcatagtggggatctccgctgttgcagaagaatccagcagaccgaaattgatctgaccggaagcgtttgttttcagcgtgcaaaccgcttcaaacgtacctgctgttttattccactttgcaagctggaaggttgcaccgggaagtgtgaccagataatcgttggaatccaccttgttcaggtcaaacttgctgaaccggacggtagccgaagaatcataattcacaacatgagtatcgacccatttctccaccagaccggagaggtttgcatggtttttaactgttacctccgtagaggaagggtaagaaatctgataggtgtattccagtacacaagccagttcatccgggacggtgacggtcatggtgtggttggggctgtcgtaggttgccgtaaaccggtcatgaccgatctcatttgtatggtctgcaacaaggttgccggtggtagtatcaagggtcacaccatacagatggatcgaacttagatccagatcagcggaggtgttgtcagagggctcaaagctaagcgtatccgtcagggtcagggtggtattgctggtggtcagcagcttatcgccggtggggttgataacaacgctgtagttgatcttcttggtcgcaagcttattgccggtggcatcggtgccttcatcgacaatagtgccggtcttataaagcttttcatagctgcgcttgacggtggtttccgtttctgccttatcgccgttccattctgcgctgttgcggtacttgttttccgtacgaagatcgtcccaagaggcgtcctccgcaacgctgaccgagtagcggatatagaaaacctgcggtttatcagaaacgttgtagccgctattgatcgtaaacgtgatcgtacggtcggtgtcggttgcgccaatatgagtttttgatgcactaaagtttttggttgccgaaatatcatagtttgacctgccgccagaaccataaattgtgttagcaaaccaagcttgatgattcacagaaccgtcagctttgtactcgttggctccaaccgtgacactacttatgtcaaaggtaacaccagccggcagggtatcggtaatgaccaaatcttttgtggtcagcggatctttacaagtaagcgaggtggggatggtcaactcatagtagatcttaccgttgttcttttggtaatccagctcactgatcttgctgccagctgcatcaaaattgttttcattgtagaccagcttttcaagctttgcttccttgggctttttataggtgtagtcggcatcggtggtcttatcaccggaagcggcagtgtttacaaacagccacggctcttctatgcctgcattactgatgtcggcaacggtatggtagttgctcagctccatgctggtggcatccaacgttttgccatcggcaagcttagcggtgatgctaaacttggtcacatgagcatcatcgttcgtaaccacagcattgttctcgtcataataggtgacggtaaacgtgacatcatgctcggacgcatttgccattgtaacggtctcggtggagttgaacaaggtcagatgcagattattcttgatctcatccttcagctcggacaagactgcataatgtgtgccgtcctgctctgtgccatttacctcggcatcatggatcgtatccgtaagggtgatcttgttccaaccggtggggatggagaccgaggttttccaagtcagctttttcttgccggtttccaagtcctctgccttagacaggctcttgttaagataggagctgcggtcggtcacagtaacatcaccggaagcgccgctgccatcaaaatcagccgtatttgtataggtagtaccgactgcggtgccgtcagggactttcgtctggattttgatcgtgtagaatgctgcggtttccgatttatctgtcgggaaggtgtaactacacccagccttcttgaaatcctcggcagagacaggcttaatgtcgtcgctccagtagccgcgtgtgatctcaacgttatttacgacctccagcccggcaggcagaagatcggtaaattttttgccgcggagatcctctccataggggttgttgatcttgactgtccaagtgatgatacggctgctggcgtcataattgccgctcttggtaaggcgcggattggtgtttttaacctccgtgctcgtgtaactgtctttgccgtcgaactcagcctttaccttattgatggctttataggtgtaatcatcattaacaggaatggtggcgtgataccgcagaacgtattgctcaccggctttcagttcgggcagagcatcgtatttgagctcagtgcctacggtaagtttgctttgatagtccgttgtgacatccttttcggtgccatccgcagcaatctttatcagtttgatcgtatcttgccgataggtagcgttgctgggaagagaagaatttacggtatcaaagaaatcggtaagatttacggtatcaccggtgccgtttgtggtttttgcaaccacttcataggcgatatcaagcgttttcgccgtcgaatcgtatttgatcagctctttaccgcttgcatccttctgcacattcttggaaagagacaggtcggagatcagatcctcttttttgatggtaacagaaccggtcgtaccaccaaaattgattttttggttttccatggaggaatcagaggaagcagaagccttaaactcaaagtcaccgtcaaaggctttgccgtcggcaaatgtttcgttgtaagtaaacgtgacggtgtcaccaacaatattgtaggtgccaacgacaacgtctttaccagtactgtcacgccaagtgatattgccggagtctgaaacactgtccaacagcgtaataccgttgggggaacttgtaggttgcgacgcggttgtctgcggtgatttcattctcattaaagctgtaattcaactgcaccttaacggtctgaccgggacgcacaatgccgtttgcatctttccaagaggttacaacgccgctgccatccgtggagttgggaacctgaacagaaacgttcgtgatatgagtgcccatatcaacaggagtagcagacacggcagttacggcataggtggagggtgcagcgtaccttgcagcgcgggaacgggaaggacgcaccgcagatgcggatgcagtttcgtatacggtagtaacggagcaggagaacaccgggtcggtttcaataatatcagaagcggtgtcatcgtccgaatcggaatcgccttcgctcagctctatctgcgcatacgccacagaaataacgttttccacatcagtgttgaacagtgttacctcagccaccttgccgtccacgtcgccggaaataacggtcagcgtgtcggcatccttgtcaacactgctcacgatgcccacggtctccacgggcaaagcgtcggtcacggtggtggtctgcggctcagcagcgggggataccacgctgggggcaagggtgtccgcgccggacacggaggtcacggtgctggatgcagcggtgtcggcgctgtccaccggcttttcggcgggctgctccggctgcgggtcaacgggatcgggggtgagcacagtgtcctgcgtgccggaggtggctgcggtatcctgtgcgccggtgctgtcgtcagcactgggggctgcatccagcgcagaaacgccggagccctcaagctctgcgctgttttcaaactctgtatccacgctgaactggtcgtccagatccggctctgcactgtcggcgctgctgtccacagccacggtgcgggtgacgtacttattataaataacgatgtcgccgggctgggcggcgctgccgtcctcttccagcagccagtccatgccgctcatggagctgcgcagggcaagcacgctggcctcctgcgggatggcgctttggggaatctcggcgtacttcaggcagtaggcaaggaacatcacgtcccactcgccgtaggcattgccataggactgaccgtagcgggagtagtagcgcagggtcacgccgtccgccgggtcgatctcgaagtttttctcgctctgctcgtagcccaactgggtctttgccacgctgagcagatcctcgttccactcgccggtgatcacggcatcggcgttggcggcctgccactcctcgggggtctcaaggtcggcagaggtatcgctcaggcagcttacagtgtggtgatgctccggcagggggcacaccagcacttcctcgtagcaggcgtcggtgtggtggtggtagatgggctccacagtgtccaccaccggctccagcgccacaggctctgccaccgccatggccaccagctcggcggtctgggtgggctctaccacctgctccacaagctcgccctcttccaggccgcaggtcagctcgtactcggtggtgtagcagctttcatcgtgggtatgctcaaatttttcacagatcagggtgccgtcctcggggtcgtagcagtcatcatcgtggacgtgctcttcctccaggcaggtcagggtctgcacttcggtgtagcagtcatcggtgtgctcgtggggcacaaactcgatctgcggctccagctccagcggcatgatctcttcctcggcgctgctctgggcagcactggcggcggcagcttcggcagcggcaacttcgtccgcattttcaagctggccttccgtgtagccgcagatcagcaccttgtcgtagcaatccgccgtgtgggcgtgctccacctcgccgcactggtactgcgcggtcatagagatgccaacgccgtgcagctgccagttgacgaacagggtggtgatcatggcaagcgccagcacaaatgcggtgtagcgccgcagcgtgtgccggttttcgcggaactgctccttgtaggttttaaggatgtcgttcataacttagagtacctcctcccgggctcaatggatcaacgagaaactggacaggggccatacccttaaaaacaccctgccaatgatctgacttttttccacgcagcctatcacgctgctgcggctgtcgatggatgtggagcggtggtcgcccagcacgaagtagcggttttccggcacctgatagggaaaccggatgtcgcattcgcccacggtcagcgcgtccacatagggctcgtccagcacctcgccgtttaccgagaccacgccgttcacgtccatatcgatcacatcaccgggctgcccgatgatgcgcttgagcaaaagcttgttctgccagtaaaagccgcataactcaccgttttcaatgtggttggattttaccagcaggataatgtccttatcctttaatgtagggttcatactgtcgccggagacctgaagcaccggtaaaaacagcgtagccagcagcacggccgctgcggccaccaccaccaatatatagaccgtactgcgcagcacccgctggtagcggttctggtacgcaagacgttcacgttctgcggctacttcctcggtggaggggatggaagcaaaccggatatcgcgttttttcatgtttcctccgaaggctggctgtcggcgctgcggtactggtccagcagcgcgttggccttgcggtcaaatgtctgccagcgctgctgcacctcctgctcggcctgctctaccatggcgctgcattcctgccgggtctgcgccttcaggctgtcggcgtctgcctgtgcctgctccagaatgcgtttggcctcgctgcgcgcctgcgaaagggtgttggcagcggcggcgtcggtgtctgcaaggttggcctgcaccgagtgcagatagtcatcggcggcggcctgcgcggcggcgaacacgttgttcagctccagcgcagcctgcgcgatggagccggccttttccagccggagctgccggtcctgcagctgcgcggtaagcgcggcgttctgcgccttgagctgatcctcgctctgcttcaatgcataaataatctctatcagttcagcgcggtgcatccgccgcagttcacgatctgccatgtatgtccaaactcccaaactataaagtacaagccagcgaaaaggttttcgtaaactacgaaaatacttaacaaaaacggcttaaaatgcgcttgccgccacaggatttgcggggtgtaaagggtgcggaagcgctcctttacaagttaccttattttaccacaccccatgtaacaacaatataacaaaacagacacaaaatcaagagataacgccgaaaaaatatcgcatttttttatattttgtgtgtatttttccccaaaaacgactgcaagaccccaaaaacttaaaaagtttgttcataattttgagatgtgaagttttgcgcactactgtactgaactactgcgcgcacgaaaaaacgggagccgcactttttcgaaaaaagcgcggctcccgtatgcagactttggggtcagccttttacttgccaaagctggtcagcaggctgttcagcgagacaaaggactggtagatgacgttgacgttgttgatgatggagcttgcaccggagaagatgcgggcgatgtagttgaacaccttgccaacgtccaggaaggactggtaggcgctgcttgcaccgccgtccagataggtcatctcctcggcgtcgatcacggcgtagctggcgggcagtttcatggtagaagtagtcatggtaagatccctttcttcattggtatcaatgcgttttacagcgttgttcagaacatggtggagaccagcagggtggtaagcagggcaccggctaccagtgcgggccctacatacttctgccactgaatcgcggcgggctgggtggcgggctgcggcacggtggaagcaccggccttggcgatccagtgcgcgtagatggtagcgtcggaggtgaacacggtggaggtggtcaccttgctgccgcctaccggctcggtgtaccagccgtcaaaggtgtagcccgtcatggtaggctgctcgggcgtgctctccagtttgccggacaggttcgtgtaggttaccacagtagagcagatgccgccttgggcatccataccaatggcgtacacgttctcttcctttttgctccctgaagttttgccggcagcaaatgcagccggcagcgcacagcacagcagggtgaacaggcagatcccgaccaccagcgttttcaggaattttttcatgagatccctcgctttccttcacaaagatggagaccctgccccacccgggcgcagcccggacagcggagaagtttcttcaatctatatttatcacatccagtgtaccagaaccgcaacaaaaaatacagcttttggctgaaaaaataataaaaattatgaaaaaacgatttttacccttgcaagatgaattttatgccccgatagaccgcattttttgaaaattgcattctttaaaacttgtctttcgtaaaaacatggcaggaaatggaaagcataaaaacagcgtctaaaagcccaaaaaacgacaaaaaacgccgcaaacgctctaagtgctgcggggaaaaagctgcaaaaatgcagtgtccctcttgtggaacggcagaaaatatgctatacttagctgcatgatgcgccatcgccaagcggtaaggcaggggactttgactcccccatcgtaggttcgactcctgctggcgcaaccagaatgccccggcggcctttgcggctgccggggcattctggttgcgtctgttcaatagcggcggtggatctttttagtgggtttgcggcggttccagttggcacacagcagccacagcccgtagatcagggcggcgatcaggctgagcaccagcaccaccttcaggtacaggctggtgaagaactccttcaccttgtccaccccgaacagcagcgggttgcgggctacgtcctgcccggcgatcagatccaccacgccgatggtctcgcctgccagcttcagctccactgtgcctaccacatcgccctgctggatgggggcgcagacgtagtccggcaggtggaagtatttctgggtgacggtgccgtcgctggtggagggcagcagggtcatcatgctgtcgttggggtacagctgcaaggtgtctgtatcggaggaatactttaccgggatctccgcaatggtcaggtcggtgtccagcgcagcctgaatggaaaagctgtcgaacacccagtccatcagtttgactgtctcaaacagggcgggacggcggttggcgtagccaagggtatcgcagctgtcggggctttccatcacgcagaagatataggtggcaccgtccttattgccccacgaaacatagctctgggtgccggtatcgtttttaaaggcggtcacattgcacataccgccctgcatggcgctgcggtagtagctgccgccgctggctttgctcagcgcggcgttctggctgaccagcaccgaggaggagcggtgcttctccttggcgggcatggtaaagctgggcgcaccggacacctctacaaaggcgtcaaagctcatcaggtagcgcaaaatcaggtacatatccaccgcgcaggtggtgttgccgctgtcgatgccgcaggcgtccgtccagctgctggcggtggtgccgatgcgctgggacagggtgttcatctgcgccacccagccgtccagatcgccgccggaaagggcgtatgccacacccatggctgcctcgttggcgttgcgggtaagcatggcgtacatggcttcgcggtaggtgaaagtctcgttggagcgcatatctgcgttattggtattataaacatagtctgagatggcaaagggcatctggaaggtgttgtccagctggtcggcgtagttggtcagcagcacggcaagggtcatatatttggtcagaccgccggcagacacctgcttcgtgctgtctttatcgtagacgatgatgttggtatcggtgttgacgatataggcgcttgcagcctgcacctgatataccgggctggggtcgaacatggccccggcgggcagcacaaggcagctgagcagaaatacaagcgaaagaaccagtgcaaaaatacgtttcatgtggacaattcctttaaaaagcgataaaatatactagataaggccgcgcagtacagcgcgccggaagatcaattttgcagcaagtgtgctgtgttctataataataacaggtttgccggggcgttacaagagccttgcggtgttttacaccgttctttcgctccggcagggagggcaggaatggtatatcttacaggggatacccacggcgatatccagcgcttcaagcagggcaaactgcgctggctgggcaaaaaggacaccgtggtggtgctgggggattttggctttgtatgggacggcagcgccgcagagcgcaagcggctggactggctgcgcaagcgcccctacacggtgctgtttctggacggcagccacgaaaactacgacctgctggcacagtacccggagaccgagctgttcggcggcagggtgcagagccttggcggcaacgtgtaccatgtgtgccggggcagcgtgctggagctggagggcaagacctatctctgcttcggcggcgcggaaagtcaggataaggacgaccgggagccgggcgtgaactggtggaagcaggaaatgcccagtgacgaggagtacgacacctgccgccgcaacttagagaaagtagactacaaggtagattatgtgctgacccacgatgcaccaagcagatttttggattttaccgcccttgcccttggcgagagcaaccgtctgcacctgtttctggacgagattttgctcaagctgacctacgaaaaatggtttttcggctgctaccacaaggatgtgcagctttctaccaagagccggtgtgtgttctgtgatgtcatccctatgggcgagcggcgcaccgggctgttccaccgataggagggaatatgcaggtcacaataaaacttgccacccgggaaggcgcggcgcacatcagcggcattctggcgggctttaccctgctggcaaagcgcggggagctgactttgcgggtgcaggacgagcggcagggcagtccccttgcccgggaggcgctgctggaaacggaaatcgacggccgcacggtggtgttcgacctgatggacggctacttttacaacgacccggcggcggtgctggcactgttcagccgggcggatgtggtgttcaaacgttccttttcggaggagaagaaccggcagttcccgggcgatatctccgcaaagctgcggccattggggctgaactactacgttacctgtccgggctcgccgctggaagcggagcgcagcgcaaagagtcgcctgaaacagtgggcgctttccacccgctgctacccgcaggactttgaagcccggctgacccgggtgtgcaaaaagccgcgcatcctctttctgacccgtctgtgggacccggatgagccggcggtgcggcaatacccggaactgcaggcagagtggcggcaggtgaacgccgaccgcattgagctgctgcaccggctgcaaagcgccttcccggcgcagttcaccggcggcgtgtcggacaacgcctgcgcccggcggctgtgcccggagctgatcgtgccggacaagctgaccggcaagcgggcgtatctgcaccggatgcagcacacggagatctgcgtggcttctaccggactgcacggctctaccggctggaaattggccgagtatgtggcggcggggcgcgctatcgtcaccgagccgctgcggtacaccctgccgggcggctttgaagaagggaaaaactataaaacgtatacctccccggcggagtgcgaggagcagctgcggcagctgctggcagacccggcggcgatattagccatggcgcagcacaatgcggactactatcaagcgtggctgcggccggagcagcaggtgcggcaggctttgcggcagctggaaacaggggagagataagggggaaaacgggggatggaagaacaaaagcggcacagcggctttgaggcgatgcgcatcctcagtatggtgatgatcgtgctgatgcacggcatcgggcacggcgggctgggcagtgcggcaccgcagaggtcggtggcattctggatctactggctgctgtttattctggcgcgagtatccaccaactgttttgtaatgctttccggctattacctgtcggagcgcaaggggcctgttcatgccgggcggctgttccgcattggggcacaggtgtggttttactccatgctcaccttctgcgttgcggtcaaggcgggtgcagtcccgctttcagccatttcgctgctccgggcgctgctgccccttacctccaacggctactggttcgcttcggcctatttcctgatgtatctctcggtgccggtgctgaacgcggtggtgcaaagccttgacaggcggcagtacaaaacactgctgctggtggcgctgttgctgcaaagcgtgtgggacacgctgttctactgggcaacggatgcgacctttgtgaataacggatacagctttatctggttctataccttgtattttatggctgcctatttccgcaaataccgggtgaccgtgcccagcgggctgtgcctgctggcgtatctggcggcttcggcggcgggacttttcaaccggatgctggcgctgcgggtggaaaacgctttgcacctgaacggttttgtgaataccgtcaacggctatcaggcactggctacggtcatcgcttcggcagcgatatttctgctgttccagaatatccgtatccgctcagactactggcggcgctgggtctttcggctggcaccactgtccttcggggtgtatctgctgcacgacagcgattttacccgggcgctgctgtggcagctggtagacctgccccggttcggcggggcgctgctgccctcgctggcttacctgaccggtgcggtgctgctggttgccgttgcgggctacgcggtggatgccgtgtatcagcggttctaccgcctgctgcgtctgcccgcactggaggaaaaggcggacgcgctgaccgcccgcatcctgcaaaggatcgtcgggagcaaggaaacgtaaagaaaagcgctgtcgcacgagtttttcgtgtgacagcgctttttcagttcatcggcccggccttgtcgaacatctgctgcacctgcgcagccagcaaagcgtgcgcagggctttccagcagcgggtcggcggcaagcaatgcggcggcttcgctctgggcggcgtgcagggtgcgggtgtcgttcatcaaatcggcgatctgtaaggtgggcagaccgtgctgacggctgccgaaaaagtcgccggggccgcgggtctctaagtcgtactgcgccacggcaaagccgtcggtggtggagcagagaaatttcagccgcttctgcacggcttcgctggtgttgtcgctgacaagaaagcaccagctctcggcggcgccgcgtcctacacggccgcgcagctggtgcagggcactcagaccgtagcgctcggcgttttcaatcaccatcacgctggcgttgggcacgtccacgcccacctcaatgacggtggtggacaccaatgcatccagccgcccggccttgaaatcctccatgacggcggctttttccttgggtttcagcttgccatgcatcagccccacccggcggtcgggcagcagcgccttggcaatgtcctcgtagtaggtcttgacggcgttcagcccgccgtccggcacatcctcgatggcagggcagaccagatacacctgccgccctttgtcgatctcgctgtccagaaagcggtacaagtcctgccgccgcttgccggtgatgcaccgggtcttgaccggggtgcgtccggggggcagctcgtccagaatggaaatatccagatcgccgtaaatcagcaatcccagcgtgcgggggatgggggtggcgctcatgaccagcaggtgcgggtttgcggccttttcggccagcgcgccgcgctgacgcaccccaaagcggtgctgctcgtcaatgaccgccagacccagccgggcaaactccaccccttcgctcatcagagcgtgggtgcccaccacaaggtcggcttcgtcattgcggatagcggccagtgtggtgcggcgggcagcggctttcatgccgccggtcagcagggcgacccgcatcccgaagggggcaagcagccggttcagcccctcagcgtgctgtgcggccagaatttcggtaggagccagcagcgcggcctgatatcccgcccggatgcacgcccagatggcggcagcagctaccagcgttttgccgctgcccacatcgccctgcaacaggcggttcatggcggtatcgcccgccatatcgtttaaaatttcctccactgcgcggcgctgcgccccggtgggggcaaagggcagactctgccagaaagaagctgggtcggcgcggcgcatgggtgccccggtggcggcagcgccccggctgcgcatccgcccaatgcccaattgcaacaccaacaactcttcgtaaatgagccgccgccgcgccgctgcggcctgctcctcggtggcagggcagtggatggcgcacaccgcttcggccttggggagcagacggtatttttgcagcatctccggcggcagcggatctggcagcagctccgcatggggcaaaagctgccggatgcagcgggagatggcgctgctggtaagcccctccgtctgggggtaaacggcttcaaagggtgcggcctggatctgctcggcggtgcgcacctgcgggttgaccatctggcggcgcagcatcccgccggtaacgatgccctgaaaatagtattcctgccccagctgcaatttctgggtggcgtaggggttattgaaccatgtgatctccagactggctacatcgtccccggcagtgatgcgctccatccgccgcccgcccggcagaatgcgtccgccgggctttgcgaatatctcggccttcaccacgcattcggtgtcggcgggggcttctgcgatggagtagggcttggaaaagtcgatataccgccggggatagtggcacagcaggtctgccagcgttacaatgcccagcttctcgaaccgttctgcggtcttgggacccacccctttcaggtagcgcaccggggtgtccggcgttaaggtagtgcggttttcggtgggcatggcgtttcaactcccttccaagcgtagtatagccattgtaacacggacggagaacagatgcaaacactttgcctttgtgcggcagctgtggtacactgaataaaaaagagaagggggagataccatggagatacgcaacgcaactacggaggatctgcacgctattgccgccgtggaggcagcctgttttccggcagcagaggctgccacggccgaggaatttgccggacggctggcacactatgccagtcatttctggctgctgcttgagcagggaaaactggtggcctttgtggacggcttttgcaccgacacgcccgacctgaccgatgagatgtacgcggacgccgccctgcatgatgaaaacggtgcatggcagatggtctttggggtgaacaccctcccgcgctgccgccgtcggggctatgccgggctgctgctgcaaagagccatcgcagatgcccgcgcacaggggcgcaaggggctggtgctgacctgcaaggagaagcttttgcactattacgcaaagttcggctttgtgaacgagggtgtttccgcttccacccacggcggggtggtgtggtatcagatgcggctgcggttctgaggtagcgttacttttattatagcaatgccggagcgtctgcggacgctccggcattgcattttcacgggggggtgctgcggcagactttttggtttaaccgcaaagtgaccggtttcgccagaggctctccctttgaggaaagacttcccccggccgggggaagatgtcgcgtagcgacaaaaaggggaatcagtcaccgcagctgactgagagggcgaggacaccggcaggggacagtgcaaaacaaaaaaatcccggaagctgaagcttccgggaatcttttggaggtgacgaccagatttgaactggtggatgagggttttgcagacccttgccttaccacttggccacgtcaccatatagggagtgatgaataccactccaatggagcggccgacgaggctcgaactcgctacctccaccttggcaaggtggcgctctaccagatgagctacggccgcatattcggtgcatttgtccctgcaccctcccgagcgattcttgcgaatatcggggccccgcgaaagcttgcaaagcaagattttgtggggaagaggaggaatttcagagtttgttacggcggtcttacttgtaagactgctagacaaacgactgacattccgacgagcgacccggatcgggctcgaaccgacgacccccagcgtgacaggctggtgctctaaccaactgagctaccgggccataccggagcaactgttgctgctccttaatggagcggccgacgaggctcgaactcgctacctccaccttggcaaggtggcgctctaccagatgagctacggccgcatatcgggaaacccgaatgggtttcctttgctggtgcctccgatcggaatcgaaccaatgacacggggattttcagtcccctgctctaccgactgagctacagaggcgcaccggacgatgattattatacctgaaatttcgattttgtaaaggggtaaatgcaaacttttttgaaaaaattgaaaagtttttgttttccggcgtccctgcgcacaaaataagaacgacttttttcgcggttttcgtaccggagcgctgcgcgggaaagatagaaagaacatttgacaagttttacaacctatggtttaataaaagaaaagaacacaggcgcttatgtccgcagagatgctattatatttcttatataatagcaagggcaggcgcttgctttgattacagaacggcctgcgcagcacagctgcggcgggacgggaggagcagcatggcaaaaaaacaggaatatggcaacgagagcattacctcgttaaagggcgccgaccgtgtgcgcaagcgcccggcggtcatctttggctcggacggcgtggagggctgtgcccactcgatctttgagatcgtgtccaactccattgatgaagcccgcgacggccacggcgataccatcaacgtgacccgctgcaaggacggcagcgtcatcgtggaggactttggccgtggtatgcccgtggactggaacaacggcgaaggtcgcttcaactgggagctgctgttctgcgagatgtacgcgggcggcaagtacggcgagggcgaggataactacgagttcagccttggcctgaacggtctgggtctgtgcgctacccagtatgcatcggcgtggatgacagccgacatctaccgcgacagttaccactaccatctggactttaaaaagggcgagaacgtaggcggcctgcaaaaggagccctacaagggacgccgcaccggcagtatcatccactggaagccggacgatgaggtgtttaccgatatcgacgtgcccggcagctactataaggatgtgctgcgccgtcaggctgtggtcaacgccgggcttaccctcaactttaccgatgaaaaggaaaaagaccccgccaccggcaagccgtggcacgaaagctggtgctaccagaacggcattgcggactatgtggcagaagtagcaggggaggacaccctgaccccggtgttcagctgcgagagcgaggccgtgggccgcgaccgcgaggatcagccggactacaaggtgcgcatgggtgcggctttttgcttctctaataaggtacagctgctggaatactaccacaactcctcgtggctggagcacggcggcagcccggaacacgcggtgcgcaccgcctttgtctaccagatcaacaagtacctgaaggaaaagaatctgtacaaaaagggcgagagcgccatcagctttcaggacgtgcaggactgtctggtgtatgtatcctccagcttttccacccgcaccagctacgagaaccagacaaaaaaggccatcaccaataaatttgtctcgcaggccatgaccgacttcctcaagcattatctggaagtgtattttctggaaaagccggaggaagcccagaagatctgccagcaggtgctggtgaacaagcagagccgcgagcacgcggaaaaaacgcgccagagcatcaaaaagacgctctctacgcaaatcgacttagccaaccgcgtgcagaagtttgtggactgccgcacccgggacgccgcccgccgcgagctgtatatcgtggagggcgactcggctatgggcgcggtcaagtccagccgggacagtgaatatcaggccatcatgcccatccgcggcaagattttgaactgcctgaaggcggattatgcccgcatcttcaagtcggacgtcatcgtagacctgatcaaggtgatgggctgcggtgtggagctgggcggcaagcacaacaaggagctggctacctttaacctcgaaaacctgcggttcaataagatcgtcatctgtaccgatgccgatgtggacggctaccagatccgcacccttgtgctgaccatgctctaccgccttacccccaccctgatcaataagggctatgtgtatatcgcggagtcgcctttgtacgagatcaccacgaaggaccgcacttattttgcttataccgagccggaaaaggccgcttttctggaaaagatcggggacaaaaaatacaccatccagcgctccaaaggcttgggcgagaacgaccctgagatgatgtggctgactaccatgaacccggaaagccgccgccttattaaggtgatgcccaccgatgtggtgcagaccgcgcaggtgttcgatatcctgctgggcgacaatctggcaggtcgcaaggagcatatcgcccagcacggtgcagagtatctggatgatctggacgtgagctgagagatcgacggcctcgccctctccgtctgctcactttgttcgcatccacctctcccaaagggagaggccttggcaaaaagatgaactttgcgtggactgccaagggctccccctttgggggagctgccgagcaaagcgaggctgagagggcgagcttgtttgccgaaaaagaacaggcgtaataaacaagaggaactgtaatggcaaaaaaatcgaccaagaaaaccttaaagccggtgcgcccgcagctgggcgacggcgttgaaattttaaacgcaggcagcgtgctggaggatcccattacccgcacgctggaaacgaactatatgccctatgccatgagcgtcatcgtcagccgcgctttgccggagatcgatggcttcaagccggcgcaccgcaagctgctgtacaccatgtacgagatgggtctgctcaagggcgcacgcaccaaatctgccaacatcgtgggcagcaccatgcacctgaacccccacggcgatgccgccatctacgacactatggtgcgcatgggccgcggcaacgagagcctgctggtgccctttgtggacagcaagggcaactttggcaaggcgtacagccgcgatatgtcctgcgctgctgcccgttacaccgaagcaaagctggaaggcgtgtgcgaggagctgttccgggatatcgacaaagagaccgtggactttgtgcccaactacgacagcaccaccaccgagcccaccctgctgccggtcactttccccaccattctggcaaacaatacgctgggcatcgcggtgggtatggcctgcaatatctgttccttcaatctggcagagctgtgcgccaccaccgtggcgctgatgaaggacgagcaccacgatatcggcaccaccatgcccgccccggactttgtgggcggcggccagattttgtatgatgaagcgcagatgcgtgaaatttacgagaacggccgcggcagcgtaaaagtacgcgcccgttacaacgcagtgcccggcgaaaatatgatcgaggtcacccagatcccgcccaccaccacggtggaagccatcatggacaagatcgcagagctggtcaagaccggcaaggtcaaggagatcagcgatatgcgcgatgagaccgacctgaacggcctgaagctgacgctggatctcaagcgcggcgtggatgccgacaagctgatggcaaagctgttcaaggccaccccgctggaggacagcttcagctgcaacttcaacattctggtgtccggtcagccccgggtcatgggcgtgcgggagattttgaaggagtggacggccttccgcgttgagtgcgtgcgccgccgcacctactatgatctgcacggcaaggaaaagcggctgcacctgctgcagggtcttgccgccattttgctggatatcgacaaggccatccatatcatccgcactaccgaggaggagaccgaggtggtgcccaacctgatgatcggctttggcattgatgaagtgcaggcagactatgtggcagagatcaagctgcgccatttgaaccgggaatacatcctcaagcgcaccggcgagatcgagcagctggaaaaggacattgccgacctgaacgatgtgctggcaaagcctgcccgcatccgacgcatcattatcaatgaactgaacgatgtagcgaaaaaatacggaaagccccgctgcagtgagatcttgtacgacctgcccgaggaggacgccgccgccgaggaagaagctgtgccggactacccggtgaccgtgttctttacccgggagggctactttaaaaagatcccgccccagagcctgcgcaccgccggtgcgcacaagctgaaggagggcgacgagatcatccagcagctggagacccgaaacaacgtagaagcgctgttctttaccgacaagcagcaggtgtacaaggtacgtctggcagaattagaggacggcaaggtagcccagatgggcatcttcatcccggggcggctgggcatggacgagggcgaaaacgtgctgagcatggtcattaccggcgattacagcggttttatgctgttcttctttgccagcggcaagtgcgccaagatccccctcagctcctacgctaccaagcagaaccgccgcaagctgctgaaggcgtacagcgataaggaaccgcttgccttgatgctctacctgccggaggagaccgaacttgccatccgcaccagcgccagccggatgctgctggtaggtacggcgcagatcgccgccaagaccacccgcgacagtcagggcgtggcagtggtcaccctgaaaaagaaccagaccatcgtctcggtggtgccggcagataccttggagctggcaaatccccaccgctaccgcgtgcgcagcctgcctgccaccggtgcactgatccgcgccgaggacgagggcgagcagatgagcctgctgtaaaaaactcccccagtctcgcattcgctcgacagccccctctaggatggggcctttggcatggcggcaaagcctctggttgaattgcaaagtatccggtttcgccagaggctccctctccgagggagctggcacggcgtaagccgtgactgagggagttcaagcagtagcggcgggcattctaaatcgtttaagcctgaaaagaggaagcagtcatgcaaaacatcgacctgatctgtgtgggcaagctgaacgccaaatattttaccgagggcgtggcagagtaccagaagcgtctggcagcttttgccgcctttcgcatcattgaactgccggaggaaaagatcgaggagaaaaacgcctcggacgcggtggtaaaaaaggcgttggataaggagggaaaagccatcctttccaatgtgcgcaagggggctgccatcgtagccatgtgcatcgagggcaagcagatctcctccgacgagctggcgcagtttctggcacagcgcgccggcagcggggcaggggacgtggcctttgttatcggctcgtcccatggcctgtccgatgaggtgaaaaaggccgctgcccttaagttcagcatggggcgcatcaccatgccccatcagctggcgcggctggtgctcacggagcagatctaccgcgcctgcaccatcaatgcgggcatgaagtaccacaagtaaaatggctttttcggctcccggagcgttcgcaggcgctccgggagccctttttgcggaaaagtgtagaatctgccggaaaagtaattttcttcttttcttttggaacagtttttattatactgatagcgtagagcattctattacaaaaagcagcaaaaaacacaggatggaagaaccatgaaaaaacacagaagaggactgcggctggcggcctgtttgctgacgctggcgatgtgcgcggcgctgctttgtagctgcgggcgtaccggaaaaacggatgactatacggctgcaatgccggtcattgtggtgggcagcgataactacccgcccttcaactatatgggcacggacggtgcacccaccggcattgacgtggagctggccaccgaggcgttcgggcggctgggctaccgggtgaaatttgtgaccatcgactgggaaaagaagaaggaactggtggaaaacgacaccatcgactgcatctggggcagcttttccatggatggccgcgaggaagaataccaatgggcagggccgtatctgcacagccgtcaggtggtggcggtgcgctccgatagcgacatccgcaccctgcaggatctggccggtaaggtggtggcggtgcagtccaccacaaagccggaggaactgtttttgaatgcggagcagaacggtctgccccggctgcgcaggctgtattccctgcagaaccgggatctgctctacaccaccctgctcaaaggctacgcggacgccttagccgcccacgaaagcgccatccggcagttcatgaaggattacagcgttgaataccgcattctggacgagccgctgatgacggcgcggctgggcgttgcctttgccaaagagcgcggcgatgacctgccgcagcagctgacggaggtttttcaggagatgctggcagacggcaccgtccggcagatcgtgagccgctatctggacgaccccgagcactatctggatggactggaggacagtacccatgcatgacggaatggaaaagagccagagtattttcaaccggaagcagttcatcatggtgtgtgcacttgcgggactgttgctgctgggcggcgtgctgggggtttcggcgcacagcgacctgcaaaatgcagaaaagcagtttgaggataccatcagctatgttaaggagcagtgcaccggctacgataacctgaaccttgccacggagaccaaaagcctgatgcggatgatggaaaacgcccagcatctgtgcaaagagatcgcgcacgaccggcaggatgaccccgcgcgggtactggacgatgccgctatggcggaatatctgcgggactataccctcagcggcgcactggtgctttcaacagagggcaaaattttgtgcgcagcctcacaggatggccggacggctgacctgcaggtccgggaacagatggaagcgcagctggccggttctatcgtgctgaaggtggccgaccacccggagcaggtctacgccggacggtcggaaaatgaggatggctcctatgtagacaccgcagcctgcgcccggaaggacggggacggggtgcttgtggtgtattaccgcaccacggcagaatatgtacgcaattacaacctttcctaccagaactgcgtgcagggctataaccccgccgtggacggcaccatcgtggtgacccggggcgaccgcatcgtggccagcaacgacacctctttgctggataccaccgtggacgataaccccaccctttctgccttaaaagcgcgcagcaccgacggcggcatgatccatgtgcacagcaccaccgggcagcagtacgcttacggcatcgtggggcagggacgcagtttttacatctatgtctaccgcccggagcgagaagtatatgtttccaccatgcgcaatgtgagcatggctgcctttacctacatggttctcctgtttttgctgcaattgctgcgcggcaagaccgaccagcgctaccgggagcagcagctgcgccgggagcaggagtaccaaaagaccctcaaggcggctgcgctgaaggcggagagcgcaaaccttgccaagaccgagtttttgcagcgcatgagccacgatatccgcacgcccatcaacggcatccggggcatggtggagatcggtgaccgctgcccggaggatatgacacggcaggccgactgccgcaaaaagatctgggaggcatccaccctgctgctggagctggtgaacgaggtgctggacatgggcaagctggagtccggcgaggtggtgctggaaagcgtgccctttgatctgcccgagctgatgcacgagatcacggacgtgctggaaaaacaggcggcagagcgcggcatcgtgctgcaccgggaatacggaaagctgccgcatccccggctggtgggcagtccgctgcacgtcaagcggctgctgatgaatgtgctcagcaacgccatcaagtataaccgggacaagggtcgtgtgatgctggactgctttgagttgagctgcaccggggacaaggtgcagatctgctttgtctgcgcggacactggcatcggcatgagcgaagagttccagaagcggatgttcgaacccttcacgcaggagaatgccggggcgcgttcggcatacggcggcaccggccttggaatgtccattaccaaaagccttgtggataaaatgggcggcaccatcggggtggaaagccggcagggcgtgggcaccacctacaccatcaccctgccctttgtcatcgacagcaccgaagccgcagagccggagcagcagcagacagaccttgccgtgctgcagggacagcgggtgctgctggccgaagacaacgccctgaacatggagatcatggagtttttgctgaacgaggtgggcgtaaaagtgaccaaagccgccgatggacagcaggcggtggaagcttttgcagcctcgccggtgggcggctttgacgccatcctgatggacgtgatgatgccggtgcgggacggccacgaggctacccgcgccatccgcgccatggaccgcccggacgcaaagaccatccccatttttgccatgacggcaaacgcatttacagaggaccgccgcaaggcgctggaatccggcatgaacgagcacctgcccaagcccatcgacccggataccctgtaccgcctgctggtaaaatacctgacagagcgcggctgaactgtttgccgggctttacaagcggggcaaaacatggtacagtaaatatactgtgcttgtgcaagccgcaagcacgcccggcggtggggaaagccgccggaacacaacacgatacgacacggcaaaccagccgcggacggaaaggatgtactacaatggaacagagcgaaaagacccttgacatgatcgtcaatctctgcaagaaccgtggttatgtgttccccggttccgagatctacggcggtctggccaacagctgggactacggcccccttggcgtggagttcaagaacaacgtcaaaaaggcatggctgaaaaagtttgtgcaggaaagcccctataacgtgggtttggatgccgccatcatcatgaacccgcagacatgggtgaccaccggccatgtgtccagcttctcggaccccctgctggactgccgcgcctgcaaggcacgccaccgcgccgacaagctgatcggtgaggagcaccccgaggtgaatgtggacgccatgagctttgacgagatggacgctttcatcgcagagcacgaggatatcgtctgccccgtgtgcggcaagcacgattttacccccatccgcaagttcaacctgatgttcaagaccgctatcggcgtgaccgaggatagctcttccacctgctatctgcgtcccgagaccgcacagggcatctttgtcaactttgccaacatccagcgcaccacccgccgcaagctgcccttcggtgtgtgtcaggtgggcaaggccttccgcaacgagatcaccccgggcaacttcaccttccgcacccgcgaattcgagcagatggagtgtgagttcttctgcaagcctggcaccgatctggactggttcgcttactggaaggactactgcgagaactggctgctgagccttggcatcaagaaggagcacctgcgcctgcgtgaccacgagcctgcagagctggccttctacagccgtgctaccactgatatcgagtatgccttcccgttcaccgactggggcgagctgtggggcattgcagaccgtaccaactacgacctgacccgccatcaggaggcttccggcaagagtctggagtacttcgacagcgagaccaacgagcactacatcccctacgtcatcgagccttctctgggctgcgaccgcgtggcgctggccttcctgtgcgaggcctacgacgaggagcacctgaccgacagcaagggcaaggaggatgtccgcaccgtgctgcgtctgcatcctgctctggctccctacaagtgcgccgtgctgcccctgagcaagaaactgggcgagaaggccatggagatccgcaacgagctgagcaagtacttcatggtggattacgacgataccggttctatcggcaagcgttaccgccgcgaggacgagatcggcactccgttctgcgtcactgtggactttgacactgtgggcgacgaggccaagggcattgctgccgacaactgcgtcaccgtccgtgaccgcgacaccatggagcaggtgcgtatgcccatcagcgagctgaagagctacatcgagagcaagatcgagttctaaaaaatacactgttacgcaaaaagcagccccgccagagcaccggcggggctgcttttttgcgttgtgacgcctgaaaaaagtggcccggaaacatccgcagacgtttctgagccacaaaatttaaaatcgtcaggcgggcagcttactgctgggcgaagatctttacctcgtccttgtccataaaggctgcgcctgcaaagcctgcggcttccagctgacccagctgcttgcccagctttttgccctgcggcagtacggtgacgttgtactgctcgcgcagcgcggcggctttgcgcagcacggcagggaagtcggtgtccttgccgtacagcagagcgatcttctgctttgcgccggggatctggtagccctgctccagcagaatgccgcacacccgctcgaagccgatggagaagcccacggcgggcacctgcacgccaaggaacttgcccaccatgttatcgtagcgtccgccgccggccacagcaccgctgaactgcgggcaggtcacctcgaacaccatgccggtgtagtagccctgaccgcgtaccagactggggcagtaggctacctgataacggcctgcagccagcgtgttggcggtggccagcacatacttcaggtcatcggcgatggcggggtcggcgcagcgggcagctacggcgtccagcgtcacgtccccggcggcgataaagtctgccagtgcgttgatggcgctctccggcagctgcttctcggtcagctcggccttcacgccctcggcaccgatcttgtccatcttgtcaaaggtgatgcagacggaatccaacgtgtcggcggcaaagcccatgctctccagcataccgcgcaggatgcggcggtcgttgatgttgacggtaaagccggtaaagccgatgttcagcaaggcgcgggtggtcacatcgatcagctccacctcggcattgggggaagcatcgcccagaatgtcgatatcacactgtacaaactcgcgcagacggcccttctgcggacgctcggcgcggaacacccggtcggtctggatgaccttgaaagggttgggcagcttatccttgttggctgcgtagtagcggctcagcggcagggtgaggtcgtagcgcagacccatgtcggacagctgcttggggtcaccggtgttcagggcagcggtcagcttgtcgccgcgcttgagcaccttgaagatcaggttcaggttgtcgccgccctcggacttgtccagattttccatatcctccagcatgggggtggagatacgctcgaaaccggcagagcggtaggtctccagaatcttgccctgaatgtagtcgcgcagggtctgctcagcgggcagcagatcccgcatacccttcaaagcctgtgttttcataacagtaattcctctctatctgtaaattgtacccgccctcgatgcctgaaaaggggcgggagcgtttttaactcagtactttaccattataaaggataatgccggattgtcaatccaaatgggcacactatcgcaaattgcacaaatctttgaggtgaaggtatgaaacagcagtttgcagcaaaacacccgtggaccattctggctgcgggggcagccattcaggtgcttaccggcttaccggcggcgtggggcgtttttcagcagccggtcatggaggaatacggcctttcggagcagggtgcgggttatgcatttgccttgctcatcgccgcctttggggtggggtgtgtgctgggcggctttttgcaggataaaaagggtccgcgctgcgcggcgttgtggggcacagccctgctctgcggcggcttttttgcagcggcctttctgccgggcaggacagggtgggggttctttctggccttcagcatcccggcggggctgggcacggcctttttgtacccctctatccagtcctgcgcccaaaagtggtacgcggggcgcaaggggctggcgaccggggtcatcggcggagcggtgggactttccggcgcgttccttaccctgttcgtccgggcggcgctgcggggctttggcccggtgcagggcatccggggtgcgttctgggcgctgggggcgctcaccctgccggtgtgccttgcgggcagcgcggtactcagcgacccaccgcagaaaaaacagcagccaagcggcaaaaacaccctcgacctttccccggggcagatgctgcgcacaaagcagtactggctgtgtgcgggcgcggtgtgcttttcaacaccggcggtgctgctgttcagccccatcatcctaaagctgggcatggagcgcgggttggacgagactgctgcgctgtggagcatcgtactgggcagcgtgggcagcgctgcgggacggatgctgatgcccatgctcagcgaccacattggccgccgcgccaccgaccttggactgtttgcagcttcgcttgcgctgtcggcggcgttctgggcagcgcagggctggtgggtggtggtgtgctacgccgggctcaccttctgctactcggcgttggcggcggtgctgcctgccctttccaccgacctgttcggcctgccccatgcgggggtgaattacggctttctggccttggggcagagcgtgggcagccttgcgttcccctttgcagccaatctgctggcgctggagaacgggcggcacctgcttgccatggccggtgcggcggcgggctttgcggctatctgggcgctgcatccggtgcagaaagacccgcgctgaaacgcgcaaaaagtaagggctgcaaaaagtttgccggtgcttacggcagaattgacaaaaacttgacgactgttttgtataaagcggtggaaatgacagttagcgacggatgaccgtaaaacccggctgtactttttgcaggaaatgacttgcaaaattcgtccgttttctctataataaaaccatgcgtggtagtaccggtgcaggcgctgaaagagagcagcgcacccggttcggatgcaagcagtatggagcggcggctgtgccggcagggcgcggcggcggttttgtgctgccaaagcgacatttgtcaaaaggagagtatgattatgacctattcgcagcaagtacagaatatgtgcccgatcaccaaaggtcctaagcatggtccggctcccatccccgaagagggtgcatgggtcaaggcctatgagatcaaggacatcagcggctacacccatggtgtgggctggtgcgcaccccagcagggcacctgcaagctgtccctgaacatcaagaacggcgtcatcgaagaggctctggtggagaccatcggctgctccggcatgacccactctgctgctatggcaggcgagatcctgcccggcaagaccattctggaagctctgaacaccgacctggtgtgcgacgccatcaacgtggctatgcgcgagctgttcctgcagatcgtctacggccgcagccagaccgctttctctgaggacggtctgcccatcggcgcaggtctggatgatctgggcaagggtctgcgctccatgaccggcaccatcttctccaccaaggagaagggcgtgcgctatctggagctgactgagggctacatcaacaagctggcagtggacgctaacgatgaggtcatcggctatcagttcgtcaagctgggcaagatgatggaggatatccgtcacggcaagacccccaacgaggcttacgagaagaacgtgggtacttacggccgcttcagcaaggagcagggcgctgtgaagtacatcgacccgcgtgaggaataagagaggaggaacaactcaatggcaacttttgaatctatggatcgccgtatgcctaaaatcgaggcatgcctgaaggctaacggtctggagtctctggacgcttgcaacgagatgctcctcgctaagggcatcgactgcgacaagatcgtccgcggcgtgcagcccatctgctttgataacgctgtctgggcttacactctgggcaccgctatcgctgtgaagcgcggcctgaccgacgctgccgagtgcgcagctgcaatcggtgagggtctggaagctttcaccatccccggctctgttgctgagcagcgtcaggtcggtctgggtcacggcaacctgggcgctcgtctgctgagcgaggacaccacctgcttcgctttcctggcaggccacgagtcctttgctgctgctgagggtgctatcggcatcgcccgcaccgcaaacaaggtccgcaagacccccctgcgcgtcatcctgaacggtctgggcaaggacgcagcttacattatttcccgtatcaacggcttcacctatgtgcagaccgagtacgatatccccacccagaccctgactgtggtcaaggagatccccttctccgagggtgagcgcgcagccgttaagtgctacggcgctaacgacgttatggaaggcgttgccatcatgaagaaggaggacgtgcagtgctccatcaccggcaactccaccaaccccgtccgcttccagcatctggttgccggtacctacaagaagtgggctatcgagaacggcaagaagtacttctccgttgcttccggcggcggcaccggccgtaccctgcaccccgataacgtggctgcaggccccgcaagctacggcctgaccgattctctgggccgcgtgcacggcgatgctcagttcgcaggctcctcttctgtgcccgcacacgttgagatgatgggtctgatcggcatgggcaacaaccccatggtcggcgctaccgttgcctgcgctgttgctgcagctcaggctaacgcctaatcttttcctaagtttcagcgaggggagctgctctccgaatgagcagctcccccttttttgctgatagatatccgaacacaagcaacccaaaataagaaggatgaaacaatgaaaaagaatcagatccgcaagagcgtggctgcgctggccatggcggctgttgtaagcgtcagcctgttgggctacggctgcggcagcaagcctgcctcctccaccgcaggcgtgtccggcgagttcaccggcactgccaagggtatgggcggcgatgttaccgtcactctgactttgaccgacggcaagatcaccggctgcaccgccgagggcaaggacgagacccccggcatcggcaccatggctctggagcagctgcccggcgctattgccgagagcggcagcattgccgtggacggtgtggccaccgcaaccatcacctctgacgccatcaaggaagctgctgctgccgctctggtcgcagccggcctgaacgctgacgactacaagaccgaggtcaaggccgaggaaaacaaggccgaggactccaccattgacgcagacattgccatcgtgggtgcaggcggtgcaggtatgactgctgccatcacggctgctgccgagggcaagagcgtggtcattctggagagccagcccatggtgggcggcaactctgtgcgcgctaccggcggcatgaacgctggtgacaccgtgtatcaggacgagaacgagttcggcgagtccgcaggcgtggaaaagaccctgaagaccgctgctgaaaagtacgccgacaacgctaccatcaccgctctggctaagaccgtctccgagcagtgggctgcttatcaggcagaccccaagggctacttcgactctgtggagctgatggagctggacaccatgatcggcggcaagggcatcaacgaccccgctctggtggagactctgtgctctaacagcgctgacgccatcgactggctggacgagcacggcatcaccctgcacagcgtttccagcttcggcggcgcatccgtcaagcgtatccaccgccccgtggatgctgagggcaagaccctttctgtgggctcctacatgatccccctgctgcaggagaactgcgacaaggccggcgtgcagaccctgctgaacaccaccgctaccgagctgctgaccgatgcaaacggtgccgttgtgggtgtgaaggctaccggttccaccggcgagaccatcaccgtgaatgccaaggctgtggtgctgaccaccggcggcttcggcgcaaatctggacatggtcaccgagtacaagcccgagctgaagggctttatgaccaccaacgccgcaggcgcacagggtcagggtattgagatggctaccgctgtgggcgctgacactgtggacatggatcagatccagatccaccccaccgtggaggctaacaccgccgctctgatcaccgagggtctgcgcggcgacggcgctgtgctgatcaatgccgagggcaagcgctttatcgacgaagtgggcacccgtgacgtggtttccgctgccgagatcgctcagaccggcagctacagctggctggtggtggatcaggctatggtcgatgcttccagcgtcattcagggctacatcaagaagggctacaccgtgaccggccagacctacgaggaactggcaaaggctatgggcgtggacgaggctgcttttgccgagaccatgaagacctggaacggctacgttgaggccaagaacgatcccgactttggccgcaccagctttgcaaaggctctggatactgctccctactatgctatcaaggtcaccgcaggtgtgcaccacaccatgggcggcctgaagatcaacaccaacaccgaggtgctgaaggctgacggttctgtgatccccggcctgttcgcagcaggtgaggtgaccggcggtgtgcacggtgcaaaccgtctgggcggcaacgctgtggccgactttaccgtctttggccgcattgccggtgcagctgccagcaagtacgctgcatgagcataaagcaaaaaaactctgacaccgccgcccccaagggcagcgcgtggaagaaaaatgtgatctttgcactggtggtgctggcgctggccgcaggtgtttttcttgcggtgcgggcgcagcaccccgccaagggcagcggcctgcaggccgttgtggatttcggtgacggcgttaccgagactttgacccttgcgcaggatcacgattatctgtacgaggtaggagactacgtcgtgcacctgcaggtgaaggatggtgccatcgcgtttttggacagtcagtgcccggaccatgtctgtgagcaattcggctggctggacaaggacggtgcatgggccgcctgtgtgcccgcaggcgtgtatgtggtggtagagcccaccgcagacgcaggttcaaaatgaagtgatcaggcttccatgatggatgtctccctgaatacaaaggggagacatccattttgttttacggaaacaggtgttgcccgcgcaccaaaatgcgggcagacgatgttttgtctgcgcgattctgcatctttttgttgacaaacccgcactttttgcgtatgatagaagcaacactgaaaattgtgtcaaattggctgtgaagagaagagtacgcaccgtctgcgcctgacagaaagcccgaaggatggaaccgggcaggccgcgcggtgccgaagatggtcttggagctgcgcaggtgaacaatgagcctgcgacggggtgcgcccgttaccgcgcaaaggccggtttttgccggctaaaggctgcgtccgcaagggcacagcgaagcaaggtggtaccacgaaggttcagcgctctcgtccttgtccggttataacccggcagggcgggagcgctttttgtttgcagaaccaaaagaaaggaagacagacccccatgagcgaacacaaaacattttatatcaccacccccatctattaccccagcgataagctgcatatcggccacagctacaccaccgtggcctgcgatgcgctggcccgcttcaagcggatgcagggatacgacgtcatgttcctgaccggcaccgatgagcacggccagaagatccaggataaggccgccgatgccggtgtcacccccaaggagtatgtggacaagatcgttgctaccgtcaaggatctgtggaagctgctggacgtcagctacgaccgctttatccgtaccaccgacgactaccacatggaaagctgccagaagatcttcaccaagctgtacgagcagggcgatatctacaagggcgagtacatcggccactactgcaagccctgcgagagcttttggaccgacagtcagctggtggacggcaagtgcccggactgcggccgcgaggtctacgatgcccacgaggaagcctacttcttcaagaccagcaagtacgccgaccgcctgctgaagctctatgaggagaacccccagttcatccagcccgagagccgcaagaacgagatgatcgccttcatcaagcagggcctgcaggacacctgcgtttcccgtacctcggtcaagtggggcatccccgtgcccttcgaccccaagcacaccatgtatgtgtgggtggacgccctgagcaactatatctccgcactgggctacggcaacgaaacttaccacgactacgataagttctggccggccgacctgcacatggtgggcaaggagatcctgcgcttccacaccatcctgtggcctgccatgctgatggcactggatctgcccctgcccaagcgggtgttcggccacggctggctgctgatgaacggcggcaagatgtccaagtctgtgggcaacgtggtagaccctgttatcctgtgcgaccgctacggcgtggacgccatccgctacttcctgctgcgcgagatccccttcggcaacgatggtatgtttaccaacgaagcactgatcaaccgcatcaacagcgatctggcaaacgacttgggcaacctgctcagccgcaccgtggccatgtgcgaaaagtacttcggcggtactgtgcataatgtggcgggtactgaggccatcgacaccgagctggagaccatggtcagcgcgctgaccgccaaggtcaccgccgacatggacgatctgaccatcccgcaggcactgatggagatctttgcggtcatccagcgcgccaacaagtatatcgacgagaccgcaccctgggcactggcaaaggacgaagccaacaagcagcgtctggaaagcgtgctgtaccacctgtgcgaggcactgcgcgtgtgcggcatcctgctgaacgcctatctgcccaccaccgcccccaagatgatggagcagctgggtctggacgcttccgcactggatctggccaagaccacctacggcgcacagcagacctataccgtgcataagggcgaggcactgttcccccgcattgacgtggctaaggagattgcccacctgaaggaagaggacgagaagcgcaaggccgctgccgctgctgccaacaaggccaaggaggaagccgagaagaaggctgccgcccccgcagaggagagcaccgtggactttacccacgaggaagagatcgactttgacaccttctgcaaggtggaactgcgtgtggctgaggtgcgcgcctgcgagaacctgaaggagagcaagaagctgctgcacctcaccgtctttgacggtgagcgggagcgctgcatcctgtccggcattgccaagtggttcaagccggaggatctcatcggcaaaaagctgggcatcgtgtgcaatctggcaccccgtcccatgctcaagggcaagtacgtcagcgagggcatgatcttcgctgccgacaccgccgacggcggctgctccattgctttctacggtgacgatacccccgtgggcagccgcatccactaagtgaggagcattatgtctgacaatacagccgtccgtgcggcaaagctggataagatcttcggcacgccggtttgcgccgtgctgctggctatcttctgcaatgttctgtggggctcggcctttccgttcatcaagctgggctaccgtctgttctccatcgactccggcaacacggcctccatcttctgctttgcaggggtgcggttcatgctgggcagcgtgctggtgctgctgggcagtatcctactgcagggaaaagcaccccgcctgccccggggcagggtggcagctgagtgctgcgcgctgggtctgtggcagaccacggcacagtatgcgttctactatatcgccgtggcgatgctcaccggcgcgtttggcggcattctgaacagcacccagagctttctgggcgtcatctttgcccactttatttatggcaacgcggaccgcatgaccccggcaaaaacgctgggctgtgctgtgggctttgcgggcgtgctcatcggcacccttggcaaccacggcagcggcagcggctggggcgtgttctgcatgatggcggcgaccatcatcttcactctgtccggcccgtggaacaagtcggtcaccaaaaaggccgacagctttgctgtctgcttcctgaacctgtttgtgggtgggctggcactgtttgtgctgggcactgtcatgggcggccgtctccatgtgcaaagcgcactggctgcggtggtcatgctgtatctggccttcatctgtggtgcaggctatatcctgtgggcactgctgatgaaaaacaacccggtcagccgcatcgccatctttggctttgtcaacccggtggtcaacgtgctgctgagcgccgtgctcaacggcgagccgctgttccgctggcagtatctggcggcgctggtgttcgtgtgcgtgggcatctggctggtgaataaagcccctgcccaaaaggagaaggtatgaccggacctatttttgacacccacgcccattacagttcccgcgcctttgacgccgaccgctttgcgctgctggacagcctgcccggcaagggtgtggtaggcgtgtgcgagcaggccacccactccggggatgcgccccgggtgctggagctggcacaccgctacccgtgggtagtggcagccattggcatccacccggaaagcctgctgcccgccgccgactgcggcgaggacggccccgcgcccacggtgtcggtgtacggcggcgattgggctgctgagatgcaggcgctgacgccttactacgacgaccccaaggtggtggcggtaggggagtgcgggctggactatcactggccagtgcccaaggacgcccagctggcgctgtttgaagccgagatccggctggcgctggaactggataagcccatcatcgtgcacgaccggcaggcgcacgcagacgtctacgcgctgctcaaaaagtaccgtcccaagggcatcgtacactgctattccggcagcgccgaggatgctgtgcagctggcggcgcaggggctgtatatcggctttggcggtgcctgcaccttcaatggtgccaagcgcgcagccaaggccatcgaagccctgccgctggacgccatcgtgctggagaccgactgcccctacatggcaccggagccggtgcgcggcacccgctgcgacagctccctcatccgctatgtgggtgcatacatcgcccagcgcaaggcgattgccccggaagaggtgttccgcaccaccgccgcaaacgcccgccgagtgttcgggctgtaactgttttccgcaggtcgcggggcaaagtgctccgcttctgaataaaaagctgatatttttaaaccgataagaataaggagatcactattatgaaggcacgtattcccaaacaccgcgagttcatcatcaacttccccgacagcatcgaccagaacaaggccaacgagggctgggcaaagctgcagcagatcgtggaggactacaagaaggcacacaacggcgcttctgtttacgctcccaccttcatcgaggactgcgagcccgaggtcaagaagctgcaggaagagtacggctttgagtataccgtggagttcgttcagtaagttcagtatcgcctgatagtaaaagggtcattgcacaaaccgtgcaatgaccctttttgcgtaagttcatcccataaaatagcataccggagcgtccgcagacgtcccgtattaaacctcgtagtccagacagacgcggtttttgtagtaagggcgcaccttgctgtttgccactgccatatgcgccgggtgggtggagtagcccttgagcgcctcggcgctctcaaaggtggtgtccagcatcaggtcggcgttggaggaggggagggcatcaatgttgacatggatgtccacaagccccggaatcttgccggaaaggctttccagaccctccttaatgccagccttgacggcggccttttcctcggcggacaactcgtccttcaactgccagagaataacgtgcttgaccataacaaaaaacctcctgcgttttttctcattgtaacagggcgagaaaaaatccgcaagaggaaacagcaaagtcttactttggtgcgaacagcagcaccaccagaagcacagcacagagcaccgaaactacgataccctccaaccgggtcagccggacgtactcctccgtaggttcgggcacctgcgtataccgcccacgggaacgcaaggcaatggcatcctccggctgcagcgccataaaaataccgaatccgatgccgaaaagcgcgaccaagatcgataagatgacttccatggaaacccctcactttttgtttttgtcatccctgctcagggtatagcacagatgtgagatcagcagagcaacactgaacacaagcgctgccactatcaaaatagagtgcagcggctctactctaggtagaaaaatgttgaccagatagagtgcaccgcaaaggagcgacaggatgccgaagggtctgtggaagtggttcttttcgtcctcactgctccaaccggtgccggtgccattgtaaaggtcccggatgccgcggtataaaaacaatacgcccagtgctgcgttcagccagtctgaagtggaaaggttcaggttcatatatttgtacttacctccctgcggctcaatccgcgctgtgctcccagatttcatacaggatcaggtagatcacatcaacgatgactgtaatggtgcgtaccccgttgctcagggtagggaagccgcccagaaactgcgaagaagcaagaaccattgcgttgaagatctcccacacgccgtttttcttctgccacatggcgcggtattccgggtcgcggtcatattggttgaaaaaggtgtggatcagcgggtctttgccctgcaggtcgcggatgcccatccacagtgccacaaggcagaacaaaagctcgataatgttgtaccagccaaacgccagctgcataaaatgtacctcccatcttttaccatattataacataggggggtgaaaacacaaggacggtattcaaccttcctgcgtaaattttgcataaattgcgcatcaactatttgttgaaacaacataaaataaaaccagccggacgaggcggttgcaagccctcgtccggctggatacttacttcttcggagtcataagcctcttctccttggtgacctcattttcggaatacgggtttcatagggtgactctccttagaaacgtttcttcagaatttaggtgctttacaaggggatgaaaatcaactgtacattggactgacccttttctcaactgttggactgcggcaaacggttcatgaggatgaatttcatattaccacattctttcgagttagatttgcaagggaaacgtcttacttagtacattggtagaactccttttcagctattcaaataaggttctccggatcattgatactttcataagaatcatctccagcggatctatctgaacgctctggggaagaattgaatcgacaggttgtcgtgttatcgcattattgatgctcaagaccggctctgtttttgtgtttttatacgggggaaacatcccgtttgtggtgagcctctattttgcttctcagcgaaccccgacagcctgtccctgctgtgcgggttccatatcaaccatcggtcttcgctcctttcttcttaaagtcagcgggagtaactctcttttgagcttctgctgtacttctctggtttctggcttaattatacaggaagatgcacgttttgtctattggcagaccgcacaaagaaaagattttgtttttgtgcaatgttaaaacctgcagcggtgcggaaaaattgcccagaagttccgggccgttcgtgaaggatttttcacaaaaggggagaaagtgcccgcaaggtattatgcgccggttctaaggggagggcgcagacagcattcgggcagcgccttccttgcttttttcacggtacacagtcttttcttcgcgtgataagaaggtgtgaaggggcgcggagcaaaggtgtgcggcagatccttgaccgtgggactgccgcagacccggctcccgcccgcaagccctatccctgcaggaaggaggaaaagcaaatgaataaattgacgcaggctctgatggaagagcttaccgtggagtatgtcaaggtcggctcgctgcagatcccggaatcggtggtcatcagctgggtgatcatgctgctgctggtggtgggctccatcctgcttacccgcaacctgaaggtggatcacatcagcaagcgtcaggcagcactggaagcgctgtactcccttggcaaaaacttctttgaagggttgctgggcaaggagggcagccgctatgtgccttatctgatgaccgtggcgctgtacattgcctgctccaacgtgatcggtgtgttcggcgtaaagccccccacaaaggatctggacgtgaccgctgcgctggcgctgatgagcatcgtgctcatcgagtatgcgggtgttcgcgcccggggcggcgcgggctttctcaagagccttgcagcccctacccccatcatgacccccatgaacatcctcgagatcgccattcgccccaccagtctgtgtatgcgactgttcggcaacgtgctgggcgcgttcgttatcatggaactgctcaagctggtggtgccggtgttcgtcccggcggtgttcagcttgtattttgacctgttcgatggtctgatccagacctatgttttcgtgttcctgaccgcactgttcatgaaagagagcatcggcggcgaggaataaacaacaaattttaaaactgtaattacaaaggagatagaactatgagtggtttggtagctctgggcgctggcattgcagcgctgaccggtattggcggcggtattggcattggtattgcaacgggtaaggcaacggaggctatctcccgccagccggaagcttccggtaagatccagacgaacctgctgctgggcgctgctctggcagaaggtaccgcaattttcggcttcgtcgttgcactgctgatcatcctgttcctgggccagtaacggaggcgtggacgaatgctgaagttggatttgaacctgctgtggaccgtggtggatgtcctgatcctgtatgtgctgctgcgcaagtttttgttcaagcccatccagaacgtgctggatcagcgccagaagatgatcgaggcagatattgcagcggcaaagacctccaagaccgaggccgccgcagcacttacgaccgcgcaggacaagctgcgtaatgtggacaacgaagccgcagcccgccgcgaagcctacgaaaagcaggccgaggtggaaaagcagcagctgctggccgacgcgcagaagcaggccgacgagatcgtggctgccggtaaggccgctgtggagatcgagcgccagaacaagctgcgggaagcagatgcacaggctacggcactggcacgctccatgtgcgaaaagcttttgaaacataatttgaccgcccaggatgatgaccagctgctggacgatctgctgcagaaagcaggtgcaggcaatggcaactgaattcagtcgtgaattttttgcggataaccgcatcgtcaaggccagcctgcgctgcgcccataaactccgcgaaaaagatctggaccgcatcaagtcggagatcaaaaagctgtatgacgccacggaagtcatcctgaacatcaccgtggacgagagcctgctttccggttatgtcctgcaggtgggcgaccgcgtgttcgacaattccggccgtcatcagctggacaaaatgatggagggcaagccctcgctggctaccctcaagacccgcatcgaggactacaagcccgccgaaacctccgcagagggcggcgtggtcatctcctccgccgatggcatcgtgcacattgacggcatgaaccgtgctgtgtacggcgagatcgtcacctttgaaaacggtgccaagggtatggtggaaagcgtggagccggagcagctgggcgttatgctattcgatggtgccgagactgttggtgtgggcactatggtcacccgcagcggcaagcgcgccggtatcccggtgggtgatgcttttctggggcgtgtcatcagcccactgggcgagcccatcgacggcaaaggccccatcgaggccgagggctacaaccccattgagaagcaggcacccagtattctggaacgccagagcgtggacaccccgctgcacaccggtattctggccatcgactccatgttccccatcggccgcggtcagcgcgagctgatcatcggcgaccgccagaccggcaagacttccattgccaccgacgccatcctgaaccagaaggacaaggatgtgctgtgcatctatgtggccatcggtcagaaggcttcctccatcgcccgcgtggcagaggatctgaaaaagcatggcgctatgagctataccaccatcgtggcagctaccgcgtcggattctgccccgctgcagtacattgccccctatgcaggcactgcactggccgagtacttcatggccaagggcaagagcgtgctcatcgtttacgatgacctgtccaagcacgcggtggcctaccgtgccatctcgctgctgctgcgccgctctccgggtcgtgaagcttaccccggcgatgtgttctatctgcactcccgtctgttggagcgctcctgccgtatgcgggatgatctgggtggcggctctatcaccgcactgcccatcgtagagacgcaggccggcgatgtttcggcttacatccccaccaacgtcatctccatcaccgatggtcagatcttcctggagagcgccctgttcaacgccggcaaccgcccggctgtcaacgtgggtctgtcggtttcccgtgtgggcggcgctgcccagaccaaggctatgaaaaaggccaacgcaaacctgcgtatcgagctggcgcagtataaagagatggaatcctttgcacagttcagctccgatctggacgccgagacccgccgtcagctggagcacggcaaggcactgatggaaatgctcaagcagccgctgtgccagcctaagtccgatgccgagcaggtggtcattctggtgctggcttcccacggcctgctggacactctgcccaccgcagagcagcgggaaaagaccgctgcctttgtgcggcagttccgcgcagacgtctccggcaccatgcagaagatcgatgccgacggcaagctggagcccgaccgtgtggacgccatcctgaacgcttggaaagcttatgcgggaggcaatgaccatgtcgtccagtaagctgctgaaggagcgcatcgagagcattcaggataccatgaagatcaccaatgccatgtacctgatctcttcgtccaagctgcgcaaggcacggcagaactaccagaatgtgtccccttactttaaccgtatgcgagacaccatctcccgtgttgtgccgcatctgccggaggagccggagcaccccttcttccatgagcggaatctggaaaacccccggcgggcgtatctggtgcttactgccgataagggcatggcaggtgcttataaccagaacctgctcaagtttttgcgggagcacgcagaccccaacgaccgcttttatgtcatcggtcaggtgggctaccgcgccctgcgtcaccgggacccccgtcttgtggaggagttccgttacagcgcaaccgcacccactttgcagcgtgcccgcgacatcacggtggacgccattgatgacttcaagtccggcaagctggacgagatctacatcgtctacaccaagatccagaacgcccttaccagcgagcctgtcatggagcgtctgctgccgctggatcggcggtttttgcagcctgctcccaagggtctgggcgaccccaagggcgaggtggaactggtgccggacgcatggacggtgttcgagcagatcgcacccatctatatgcacggcatgatctttggtgccatgaccgagagcttctgcgctgagcagagcgcccgcatgaccgccatggattctgccaccaagagcgccaatgacatgatccgggacttgcagctggaatacaaccgcacccgtcagggctccattacacaggagatcaccgagatcatcggcggcgcggctgccgtgcaggatcggacataataaaggaactttctctggcatcgcgcagcgatggctgagagggttcgttggataaacaagatttgacaagaggcaatccaaatgatacagggaactattattcgcgtagcaggccccgtggtggatgtgcagttcaccgccggcaggctgcctgccctgcaggaggcgcttaccgtgaccgcagagggcaccgagcgcaccatggaggtgacgcagcacgtcaacgagaccacggtgcgctgcatcatgctttctgccagcgagggtctgggcaagggaatgccggtggaagctaccggccacggcctgaccgcccctgtgggcgagggcacactgggccgtatgttcgacccgctgggccgccccattgacggcaagggtgctgtggacgagctgccgcactggcccatccaccgcaaggcacccggctttgcagagcagaagcccgcaactgagattctggagactggcatcaaggtcatcgacctgctggcaccttacgccaagggcggcaagatcggcctgttcggcggtgccggtgtgggcaagaccgtgctgatccaggaactgatccataacgtggccaccgagcacggcggctactccatcttcaccggcgtaggcgagcgctcccgcgagggctgcgacctgtggggcgagatgaacgcttccggcgtgctggacaagaccgcactggtctttggccagatgaacgagcccccgggagcccgtatgcgtgtggccgagaccggcttgaccatggcagagtacttccgtgaggaaacccacaaggacgtgctgctgttcattgataacatcttccgtttcgtgcaggccggcagtgaggtctctgccctgatgggccgtatgccctctgccgtgggctaccagcccacgctggccaacgagctgggcgctctgcaggagcgcatcacctccaccaaggacggctccatcacctcggtgcaggccgtctatgtgcctgccgacgacctgaccgaccccgcccccgccaccacctttgcccatctggacgccaccaccgtgctgtcccgtaagatcgtggagcagggcatctacccggctgtggacccgctggcttccacctcccgcattctggaagcagacatcgtgggcgaggagcactaccgcgtggcccgcaaggtgcagtccattctgcagcgctatcaggagctgcaggacatcattgccattctgggcatggacgagctggacgaaaacgacaagctgaccgtcatgcgcgcccgcaagctgcaaaaattcttgtcccagccttttgccgtggccgagaactttaccggcctcaagggcaagtatgtgcccctgaaggatacggtgcgcagttttgccgccatcgtggacggtaaggccgacgacctgccggagtgggcgttcttcaacgtaggtacgctggaagaagcgcgcgaaaaagcagaaaagaagctggctgaggaaaagggcggtgccgtctgatgaacaagttcatgctgagcatcacagcgtccagcggcgagttctatcagggtgactgcgaggatctgaccctgcccatcagcgatggcatctacggcgtacaggccgggcataacccggtgctggtggcgctgcacatgggcatcctccactttgtggtggacggcaaagcccgggatgtgctggtaggtgacggcattgccgaggtgacccccgcctatgtgatggtgctggtggacagcgccgagaacccggaggacatcgacaagaatcgtgccgaagccgcccgcatccgcgcagaggaacgcttgcagcataagcagagtatgcacgagtattaccagagcaagatcgcactggatcgtgccatgcagcgtttgcagaccgctgcaaagtataagcgctaaggcagtatcccttttaccttataggataggaaaaaatcccccgtttgcccgtggcagcagtgcccgggcaggcggggatttttttgttggaagcacttgacagtttctttttaaagtgatatgattttgatatcagaaagaaatgcttccgaccctgataaggagggacttgttatggaagagaaaattttgaatacccgcaaaaacggtatggccatgctgctgctcaccttgctgggctatgtggtgtccattgccctgttcattttctgtatcacgctgctcaatgcagatcggccgcaccggctgtttctgggcattccgctgctgattttgtccattgcctattggattgcaggcattttcctgttctgtggtctcaaagtgttaaagccgcaggaggcgctggtactcaccctgtttggtgattacatcggcacgttgaagggacagggcttttactgggtaaaccccttctgtaccgctgtcaaccccgccgccggtacccgcctgagccagagcggagatgtgaacagcaaggaaaacagcgtggctgcgctgtttggcagtaacggccagaatgctcaaatgagcatcgagtccatgagcaagaagatctccctcaagatgatgaccctgaacaactcccgccagaagatcaacgattgtctgggcaacccggtggagatcggcattgcggtcatctggcgcgtgaccgataccgccaaggccgtgttcaacgtggataactataaggaatacctctccctgcagtgcgacagcgccctgcgcaacgtggtgcgggtgtacccctatgatgtttctcccaatgtggacaccaccggcgacggcgtagccgatgagggcagcctgcgcggctcctccgaggtagtggctgcccgcatccgggacgagatccagaagaacgtagccgaggccggcatcgaggtggtggaagcccgcatcacctatctggcctatgcaccggaaattgcagcggtcatgctgcagcgccagcaggccagtgccatcattgacgcccgcaagatgatcgtggacggcgctgtgggcatggtggaaatggcgctggatcgtctgaacgagaacaaggtagtggagctggacgatgaacgcaaggcggcaatggtgtccaatctgctggtggtgctgtgcggcaaccgggatgcccagcccatcgtgaacagcggcagcctgtactaatggccgagccgaaaaaacaggtgcccctgcgcctgaacgccaagctctacgatgcccttgccgcttgggcagaggatgacttccgctcggtgaacgggcagatcgaatatctgcttaccgagtgcgtgcgtcagcgcaaaaagaacgggaaatatgtctccgaccagctggacgtcccgccggagctggatctccattgaagcacccgtgacaaacgcaaattattaaaacaggctgctgcacaagaccggtgcagcggcctgttgtttgttatgagaaagctgcgctttccaaggagcagagaggacaaacgaagagaggattgatataccaatttgttgcataatgctccggcatttcgtcgaaaaagcaatcgatgaactggaattttggcgaaaacgcttcttttttggatttttccagaaaataacttgcctaaaagtttgcggcgtgctaaactaacagcggggaaatgctttacgtaagcagacagggggtgaagctatgaaaatactggtcgtggatgacggtcagcttgcgatcaattcgctgatccgcatcctgtgccgggtcgcgccggactgtgactatatcagtgccatgacgaccgacgatgctttgacgtggatgcggcagggaccgatggatgcagcctttctgaacttggaaatgccggggatgaacggccttgcccttgcccgtatgatccagaagctgcaaccccgctgcaacctcatcgtggtcaccgagcacccggagtatgcgctggaagcattgcagatctttgtcagcggctttctgctcaagcccgccaacgagtccgatgtgcgcaatgtgctggaaaatctgcgctacccgccggaaacggcgcctgtgggcatcaagatccagtgcttcggcaacttcgagatctttgtgggcggacgtccgctctccttcaagcgcagcaagagcaaggagctgctggcttaccttgtggaccgcaacggtgccacctgcaccaacggcgagatgctggctgtcctgtgggaggataagcccgataccgcttcgctgcacagccacctgcgcaatttgatcttcgacctcagccatacgctggaggatgcaggggtcaacgggctgctggtacgcggccgcagcacattggcgctggataccagcaaggtggactgcgattattataatttcctgcggggagaccgctcagcgttcaattcctaccgtggcgagtatatgacccagtattcctgggcagaggtcacccgctcggcgctgcgccagcaggccgcagctacgcccaaaagcgggtctatcccaagctattacgtcccgcccacgggcttttaaaactgcataaaacaccaaaggctgctgtgcattgttgcgcagcagccttttttgactgactttataacttgcaggccgggaaaatatgcgtctctttctgggaaaatgggataatggaacgcccgcagacgttccgtcatcccgaaataaatttttcaaaaccgttccagttccagcagatattccttgatatccagcccctcggcgtagccggtcaggctgccgtctgcgccaatgacccggtggcagggcaccacgatgcacagcgggttgcggtggcaggcgctgcccacggcgcggcttgccttggggttgcccagcgccgccgccagctgaccgtaggtgcgtacctccccgtaggggattttgcgcagctgcgcccataccgcctgctgaaaggccgtgccctttgctgccagcggcaggtcgaactcccggcgcaccccggcaaaatattcgttcagctgctcctcagcttcttgtaacaggggcgtttccaccaccctgcggggcagcggttccagctccggcgcaccgtccgggcagaaatgtaccccgcacagcgcgtcgttctcctcctccaagcagatggctccaaggatgctgttgatgtaccagacgttcaaaaccggcctcttcctttcctgcaagaatgtgctatactggtactatcttaacacaaaagcttccgtgaggaaaggggcgtttcaactatggtcaaggcactggaagacatcattgcaaaaagcagcagcattgtctttttcggcggcgcgggtgtttctacagaaagcggcatcccggatttccgcagcgtggacgggctgtaccaccagaaatacgactacccgcccgaaaccatcctcagccataccttctgggaggaaaacccggaggagttctaccgtttttaccgcgataagctgatcgtaaagggtgcaaagcccaatgccgcccatctgcggctggcaaagctggagcagcagggcaggctgcgggcggtggtcacccagaacatcgacggtctgcatcaggccgcaggcagcaaaacggtgtacgagctgcacggcagcaccctgcgcaactactgcacccgctgcggcaagttctacgatgtggattttatcgcaaacagcaccggcgtgccccgctgcaccgagtgcggcggcatcgtaaagccggacgtggtgctttacgaggagggcttggacgagcaggtgctgtccggcgcggtggatgccatccgccatgccgataccctcattatcggcggtaccagtctggtggtgtatcccgccgccgggcttatccggtacttccggggcgataacctggtggtcatcaatatgcagcctaccggagccgatgcctctgccgacctgtgcattgcaaagcccatcgggcaggtgctgagcgaggacatctcgctggactgatttttgcgcttcaggcgcgctgtttcgcgccggtttgcacgcagttttccgtatgctgtttgacagaacaacagaacggaggaactgcaaatgatccaggtatgcgacctgccgcgtcagcggcaggtacggcggctttccgccgaggaattttttacattggtgcgctgcggcggggcggggttttaccgtccctgctccgaggtgctgcggatgctgaccgcaggcgaggcgtggggcacagccggggcggcgctgctggtgctgcccctcaccgccgatactgccgccgcagcggcactgcgcagctggctgggacgcaggcagctggagggcggctgtctgcttaccccgccggtgagtaccgacggggagctgcccgcccggctggtggaggttgccgcagcccgggcagactggctgcgccgcaaggagggcacggcatgggcggtggtagagtgcaccgaaacggcagcggcgctgcttccgctgtatttccggcagggcttcgggctgcgggcgctgcgcccgctggaaagccttgcgccctgctttttgctgcgcaccggctgcgtgcccgtccgcactgcgccggtgtgggtgccgctggaggacagggtacagctggcattgctgctggcaaaaggctatgccgcgctggacagccgcccctacggcggcagccttgcgctggcgctttatccgctgaaagaaacggaataacgtaaaccagagagggaatgagaaagctatgaaggcagtgatcctggaaagctatgtgatggaagaaggagacttggactggtccggggtaaaggtactggtgccagacaccaccagctatgtgcgcaccgactacgccgacattgcgccccgcatcggggatgcagagctggtgctcatcaacaagtgccgcattgacgaggcagtattggcgcagtgcccgaacctcaagtgggtgggcatcatcgccaccggcacggataatatcgaccttgaagcctgccgccgtcatggggtggcagtggccaacgtgccgggctattctacttacagcgtggcgcagatgaccttcagcctgctgctggccatctgccagtgcgcccagcggtacgaccgggcggtaaaggacgggtactggcagctgggcatcccggcagaatacggtctgctgccgcaggtggagctgctgggcaagacctttggcatctacggctacggcagcatcggtcgtcagaccgcacgcattgcaaaggcctttggcatggaggtgctggtgtgcacccgcacggtgcgcccggagtacgccgccgatggggtggagttcgtggactttgacaccctgcttgcccgcagtgatgtgctcagcctgcactgtccggctaccccggcgacccgcgggctgatgagccgggaagcccttgcaaaaatgaagcccggtgccattctgctgaacaccgcccggggcgcactggtggacgaagaagccgtagccgatgcactggaaagtggcaagcttgccttttacggcgcagacgcctttgccaccgagccgctgccgccccaaagccgtttgcgcagtctgccgggcgcggtgctcaccccgcatatcgcgtggaccaccaaggaagccttgcagcggctgatggacattaccaccggcaatctgtgcagctttctggccgggaaaggcgagaatatcgtcaactcttgattttggcagaagaaactgccgtaaaataacgtatgcacaagagcagccggcagctttgccgctgctctgagggaggtaaaaatgagctacgccatcgtattcagcagcagaacgggcaacaccgcgctgctggcacagaccctgcgggagcagctgccgcaggcagactgctgctatttcggcgcaccggacgctgccgcattggcagcagataccctatatgtgggcttttggacggacaagggcaaggcggatgccgacacactggattttttgcagcagctgcacggcaagcgggtattcctgtttggcaccgcaggctttggcggcagtgcgccctactttgaaaagatccttgccgccacccggcaggcgctggacggcagtaataccgtcatcggcagctttatgtgtcagggcaagatgccggtgtccgtccggcagcggtacgaggctatgaaggcaaagcctttgcacatccccaatctggacgccctgatcgaaaacttcgataaggcgctctcccacccggatgccgcagacctcgagcagctgaaacaggctgtaaagtgagtaaaaaagagcgaccgcgcatggttttgtgcggccgctctttttgtatgggacaaacgctagtcgatggtggttttggtgcgcccgatgccgatgacggcggtggagatctttttccagctgtcgcagccgcacacgccgtccacccgcagactggtgcgcttctgataaccgcgcagagcctgctcggtgcgggcaccaaagataccgtcgatgcggctgccggtttggtagccaagggtggaaagtgcgtcctgcaaaaccatgacatagcagccccggctgccccggcgcagggtggggtaaccggcggtggtgccgctgcaggccggggtgccgtagcggcggtcaaagtgcacccatgtgggggtctggctcagcggctccacatagccccacgcgccggtagcgcgggcggcgttgtaaatggcggtgcgctggcgctggtcaaggctttgccccacatcgaacgctacccccgcgtagtgctggctgcgggtgccgtgaccgccctcccagatgcggcggaaggcgtaccccaccgggatgcccctgccgtatttgcggcgggtcagattccacgcttccatggcggcaatggtggtccatagggtagggctggccgatttgccccggaactcccgcagccgcagggtggtcagggtgctgtaaggcatggggtcgttctcgttcaggtttgcgtaggtgtacaccttgttttcgtaggcgtcatagatcaaaaggcgtgccatccctcattcctccttctcgcagccgcaggggtcggtgcactgggcttgcaaagcgtgccatgtttcccggtacacgatgccgtttaccgggtgcagccccgcctgctgctggacagcccgcacggcggcggcgtctgacgcgccaaagcggttgttatcggccacatagccctcgccgcaggaaagctgtgcccggcggttgagccagcgctctacctgtcccacctcctgcccggcgctgccctcggcgatggcgcgccccgggtaagcggtgccgggtggcgtgtctctatcggggttcggggcatgggcagccagctgcaggctcagcgcttccaccgccgtccatgtgtcggcatcggcaatgccggtctgctccagccccagcagctgctgggcgctgcgggtggcggcggcagtctcctcggtataacggtcggcaaggggcggggcctccacgctggaaaaataataggcgatgcgctgtaaaagcagattgtagtacagcacggtatcaccgctgctgcccaccgtcagcggggtgccggggtagggcaaacgctttaaggtgaccaccgggccggaggagcgcagctggctggcgcggccgtagagagagttccatgtggtacgtcccactatgccgtccacggtaagccccgcaaaccgctggtacgcccgcaccgcccgctcggtatccgcgccgaactttccatcaatgcttaccggcgggatgctgctttcgtaggcgctcatgaggtagaggtaaaattgcagttcccgcaccgctgtgccggtggagccggtgcgcagcacgcccgggtactcgccggggcgcagggaagaggagagcagccggttggcgatatcgttgtacacctcgtacagcttttgccatgtggtgcgccccaccaccccgtctgccgtcagcccgaagtagcgctggaaccgccgcaccgccgatgccgtgcccgcgccgaattttccgtccacggtcacgctttcaaggcttgtgtataccgtgcgggcgatcttcagccagaactgcaccagccgcacattctgcccggcagacccctcccgcagcggcgtgccggggtaggcgttgggggtgccgttgtcggactggatgctcaaaaactcgtcgtacagctctttccatgtggtctgccccactatgccgtctacggtaaggccgtatttgcgctggaaagcacgcaccgcattggcggtggcagtgccgtatacgccgtccacctttacggcggggatggcgctgtcgtactgcgccagcgtgttcagccagaactgtacctgctccaccgcgctgccggaagcaccggtgctcagcaccgtaccgttccatgtgccgttggacagggtgccggtggaagtctcgccctcgctggtcagctcggcgagatcttttaccgatacatagatatagctgatcttgtaccatgtctgccgccccactacgccgtcggcggtcaggttgaactgcttctggaacgcccgcaccgtggcggccatccggctgccgaatacgccgtctaccgtcagctttccaaggaagggatagtccttggtaatgcggttcagctgccgttgcagggtgaacaccgccgcgccgcggctgccctgccgcagtggtgtgccggggtagctctgcgggatggagcggatatttttagtgcgcacgatctcgatgctgctgccgtagtagtagcgcaagatctgcaaagcgctgcgcccgttgttggccagcgtcaccgtgccccactgcttgagccccggacaggtgaccgacttgccgtcgcagtactcggaataataggggttcaccgtaccgcttttgcgcaggtaggtgttgaagatgtcgtccgtgatgcgcaccatcacctcgaacaccgtgcgcccgtggacgtagtactggtcgtagctggtggagttggtaatgttgaaggtgtagcccttgctggggtaccactcggtgtagatacggttcagcgccagcgagatctggcagtggatgtttgcccgcagtgcctgctccggccacggggaacaccataaaccaacggacgaaataaatgctgcatcgtgtattttgcagcgtataaaaagcggctgctgcacaaaatgctgtgcagcagccgcttttttgggagctgatgaaacgcttacgcttccgtttcgggctcttcctcgggctttgcttcggaatgccgccaatggaaccagtcggcggggatgccgctctgggcaggggtaagatccggcgcggggtgaccgtccggcaggtgcgcaccgaaggccggaacaaaaaagaacttgcgcacgatgaagatcagcgcgatcgcgccaacgctgagcagattctccacggcggaatcgtgccccaccaccagatggcgtgcaatggcgtaaagcagcacctcaaggctgctgccggggctgtgcttggccagcatcttgatgaactcgatgccgatcacgatatccagactgcgctccagaaaggtgcggatctctgcttcgttgccgtcgaacagcaggccgggcatccagcggatgagcggcacaacactgaacagcagaccgatcagcaccagcccggacaacagtacctccagcagactggaagcctgaatgatgcggttgcgcagggaggtgcgccagtggctttctaccgggtgagaggggtgttccatagtaagaccttcctttcggcattctgctaaacaggattcgacaaacttctggttagattgtagcagaatgcgggcaggctgtcaattcatggaaaatcaattcaccttggcggcagactgtgccggaacgtacccggccttctggatgcaggcaataccgtcggcggtgtccagccagtcgtacagacggcgctccgggctgtcggcggcggcatccgggtggatgacggcgtaaaaatcgttgcaaagggggtagctgccgtcggcaagggtatcgttgctgggggtcacaccgtccaccgccagcagacgcagcccgggtttggagtacatctggtcgatgtaataatacaccgagaaaccgatggcgttggcactgttgttgtaatcggcaatgctgtccaccagctcacccatggcggcgggagccagctcagagggcggggtcatcagctcaccgccctgaatgagcagctttttgaacagggtctggctgccagagtcctcgccgcgctggaaagcaacgatggcctgatccttgccgcctatgtctttccagttggtgatctttccggcgtagatgtcccgcagctgctgctgggtaagtgcctgcacggggttgtcctcgttgacgatgaacaccagcgcgtccactccaatgggcttctgctccagctgcacattggccttttgcagctcttcctttacatagtccggcgcttcatacaccaccagcatccgggtggtggtgtcgtacaagccaaagttttcccatgcgtaggcggtggtgctcaccgtgatgctgctgcgggcttcttccaagtccataccggtggtatcggccagcatctgcgccatcagcgggatgcaggcggtgctgccgtccagcgggggaaactcctccacggtcagaaacggcgctgcctgctgcacagtagaggaagcagcagaggatgcgggctgttctaccacagaggaggcggtgctgccggagggcgcatccgtgcccttgcaggcggtcagcaccccggcggcggagcaggcagccagccccagtagaaagctgcggcgggaaattttagtgtttttcataaaaagccctcctaactcaatagccgtaactcggttcatcgtccgcagtggcagacgagaaaatgctctggcagtacagccagttgccgcttgtgtccatccagcccacatagaagccccgttgtgcagcaaacacatggtcgggcagggcgttcaggctgttagaatagtacccggcgcagctggcaagcccctgtaatactaccttgccgtctgcgtccagcacatcgcatacgttgccgtaggcgctgcccacagcgctgcggctgccgtagaacatgggtctgccgtcggggtcggtggtcaggtagttgacgtaactgtacttgccctgcagggcggtcaggtcgctgacaagcccctgcgggccgtacagccgggtggcggtggtctcgtagcggtcgttgtcctgcaatttcagccagacgtagccgctgccgtagttgctcatccgtacccgctgctggtgctccaccggctctacggtggtgtcggtcagcagcttgccgttgtccttgctgtacacccgcaggctgccgtccagcgcgtagacggctatggtgttatcggtggtgttcacatcgtacagcggggtcttggtgccggtttccagatcatagagctcgtagccatgatcctcgccgctgtgccatgttaccacatagcccgggaaatattggctgggctgctcgtcaaaggcggcaatcagtccgcggtcctctgtggtcatatcccgcagttcgtaccggccatcgccggtggaaaagctggcaagaccgcccgggtagacctgcaaaaagcccgtgtactgctcgccggtctgggtgttatacaaaatctggtcggtggtctcggctccggtggcaacgtccagctccacccagtcgctcagggtatcgctgtcgtagaaaaggcggtatgccgaggcggcatcggcgcggtagacgggggtgccgtccttttcctgcacaactacccagcggttctgttggtaatccatatcccagtcgtaatcgtccagcccttccgggcgggcgtagcagctgaacaccagcttatcgccgcatagggtgcagctgtatgcgccctccggcaccggcagcgctgcgccggtggcaaggtcgatgacctgacaggtgccgtagccggactccgggacgtagccgccatcgacaaggcggctctcctgcagcaccagcaggccgttttgcagggtagcgttctgctcgccctcaaaggacatcacctcagtgccggtcttgtcgtacagggcggtgcggcgtccgccccggccggtggggtcggaccagctgcgcagccagtagtccgcgatgccggtggcactgtcctccaccagcgagacgttctcgctgcgggcagcctgatgcagcggggtgctgccgcacaggatggtggtgctgctccccgcgcggtcatagcagtacaatacccgcagacggtcatcgttcagcacggcggggtcgtacaggggcttgccgctgtcgtccgtgggcacggaaacggcagagcttgcagcgcccggcacgccggtggcgggcggcagcagggcacagccgcagcccaaggtaagggcaagggctgcgcagaccgccccgcagccgatacgcaagacaacacgcttcataaaaaccactcctttgcaaaaaacagggaggaaaatttttccgttcactcagaatacgaaacagccgcatttttcattgcagagcttgcagaaaaatgcggctaaaaatggttacaattgcattacagctgcgccggggcaggggatgcttctgccttgtccatctgctccagctgccgcagaaaggccagcaaaaagggcagcgagatgaaaaaagtaagcgcatccgcaatgggctggcagagctccacgcccacaagaccaagcacccggggcaatactaaaatcagcgggataaagcacacgccctgtctgcagcaggccagaaaggtggcgcgcccggccttgccaacgctctggaaggtcatgttggccactacgatcaccggctgcaaaaggacggcaaagcactggtaacggaaggcaggcagcgccacggcggtgacttccgggtcatcccggaacagacgaatcaaagcttcatccttccaccagcacaccgcgatcagcaccaccagcagcgcaaaggcggctttcagggtaaagatggcagcctgccgtacccggtggtatttgcgtgcgccgtagttgaaggacgccaccggctgcaagccctgtcccacgccgatggccaccgagaggatgaacataaaaatgcgggacacgatgctcatgcccgccacggcggcgtcgccgtagctgcgggcggcaatgttcagcagcatcccgccgatgctgttcagaccctgacggccaaagctgggcgcgccgcctgcaaggatctgcaaaaactcgcgcggctcccgggtgacggcggaaagccggaactggctgaccgttttgccccgcaggaacatatacagcagaatgccaaagctgatggtctgactgagggcggtggcgataccggcaccggcagtgcccagcccaagcccgaacatgaacagcgggtccagcgcaatgttcagcagcccgccggtgacaagcccgaccatggcaaggttcgccttgccctcataccgcaggatgttgttcatcaccagactggagatcatcagcggtgcggcaagcaggatggggcgggcgtaggcgcaggcgtggggcagaatggtctcggtgctgcccagcagcatcatgaagtccggcagggtggcaagaccgaccactgccagcactacgccaaaggccagcgccgtaaaaaagctggtagaggcaaagcgggtggcggcgtgggtatcctgactgcccaagcggcggctgatgatggtgccggagccgtgccccagcataaagcccagcgcctgtataatagccatcaggctggaaacgacacccaccgcgccggaagcactggtggagatgcgccccacaaaaaaggtatcggccagattgtagatgctggtgatcagcatacttaaaatggtgggcgcggccagactgaggatcagccgggggataggggtctcggtcattttatgatattgcaccacagtgcggtcctgctgggtcatggaaaaatatcctcctttaaaaacgagaaaaccgccccttccagagcggcagataagctttgtaaaaacagtataacgcagttgcggcaaaatgtcgagagggagaaaaaacggcctttctcccctgcgaaggggcgaaaaagcaggtgaaaacagggtgctttctatataaaatgctaaagaattgtcgaattgcttgtgaaaaatcacgatatgtggtattctttataagaaggaattggaaaaatctgtgcattttatgattgggagggatttgtacatgaaatccgtagcacaaactgtgatcgaagccgaccgcttttataccattgccgctcacaccggcaacgtcattcaggcagtggaaggcagcaaggacggcggcactgtccgtctgggcaagtatgaccacaagcctgaacaggagtggagctttgtccgcgagggcgatggcgtgtaccgcatccgcaaccgtgcttccggcaagctgctggatctgaccatgaccggcactgccaacggcacatggctgcatctgtgggaggacgtgggcggcacgtcccagatgtggaaggtagagcacaccccggagggaaccgtgcgtctgcgttcttcttgggcaggcggcaagtgcgtggacactgtgggcatcggtgccgaggtgggcgctgtgctgcagatctggcaggaagtgcccggcggtggcgaccagctgtgggtcatctctgaggtaaaggaccgcgtaaagcgtgccgctaaggctgagcaggcagcagccgctgccgagacgaagtccgcaccggccaaggaagccgcttccgccaaaaagcccgcagcccgcaagccccgcatcgccaagaaggtggaggagaagcccgctgcgcccgcagtaaaggccgcagagccggtcaaggcagaaaagcccgccgtgaagaaggccgctaaggcaaaggcagagccagctgcccccgccgcagaggtgaaggctgcgcccgttgtggagaccaaggctgagactattgtccctgcaactaaggccgcacccgctgctgcaaagcccaaggcaaagcgtgcaccctgcaaaaagaccgtaaagaagtaaaagcagaatcattgttctgttttttagagatttcccccgcagcgcaaatgtttccgaaggaaacaggcgctgcaaatgccgtttttcgttacgaccctacctgtgaacataaaaatcggacagaccgcagtctgtccgattttttgctttttaaaataatttttccgctgaagatggtcagagcgaagcggagaccattcaaaatagtccgctttatgcggcaggggagacggcatcatcgctctgggcggcggtctgcacgaactgcacgatgctctcgatggtcttgcgcagctgcacaaggctttccacgtcagagtcctgcatccgtgaggtgggagcggtcaccacggtctgggcggcagtcaccgtgccggtcagctctgcatggatgtggtgggcgggcacgtccagcaggatatgcaccttgggggacagggtcttgagcagaccctgcttttcgatgcccagaatcagctgcggcgcatcctcaccggcggcgaggttcggcagctgaaggtaaaggtagccttccttcgcgttggcgggctgtacggttttgagctgcttgagatccagctggaagtcattcacctgctgcaagccggtggcggcggggtctacccccagcagggtagccagctggtcttgggagatgtagctgcccagcgaccagcccggcagcagcaggcttgccagcggatactcggccacgaccgtgctgcgcagcttgttgtacagctgtccggcatcgtacagagtctcttcctcgctgatgtacatccgggtcagaggggcatcgttgacggtgctggtgcccgtcgggtacagcgccagctgcaccgcccggggggtgtactggccggtcaggctgccggtagtgccgccgaacttgtccagcagggcgtaaagggcagggggctctgcttcggtggaggtgatggtgtagtccagcgcaaagctggcaccgctctggaatgccttgaccttgcggctgacgaagctgtacagcactgccgcagccaccgcgcacaccaaaaccagacacagcagaacgatcagcgccgcacgcagaccggtgcgctttttgtgggaagatgccatggaaaaacctctccttccagtaaaacgtatttgtttcagcataacggaactgcccgcaaatgtcaagcgccgcaaactgcggacaaaacaaaaaacctgaaacatttctgtttcaggtttctggcggaaagatggggattcgaaccccagaacgcttttgacacgttacacgatttccagtcgtgcgccttagaccaactcagccatctttccacatcttttgttctgcctttgggcgggtgcccttggcgctccactataatacctgaaagcaggctttttgtcaaggatttttttgaaaaaaatcagacttttttaaaaatgacgaaaaagcgcgagaaaacgttctgccgcatggatgaaaagcacaaaaagcccttgacgcacctttaaaataggtctatattgagggcaaagagcactgcggtgggtcattttgtgccgcagcggcgggaaatataaggaggatgcttttatgacttatcctgaagtacttgccaatgcccgtacctgcattggtcaatactgcaaggcctgcccggtgtgcaacggcgtggcctgtaaaaaccagatccccggcccgggtgccaagggcgtgggcgataccgctatccgcaattataataagtgggcggacatccgggtaaacatggacaccctgtgccccggcggtacaccggacactacgctggagctgttcggcaaaagcttccgctatcccttctttgcgggccccgtgggcgcggtgaacctgcactactccgatacctacaccgatatgacctataatgatgtgctggtgcgcgcctgtgccgaaaacggcattgctgcctttaccggcgacggcaccaaccccaccgtgatggagatggctacccgcgccatcggcgctgcgggcggctgcggcgtgcccaccatcaagccgtggaacatcgacaccatctgcgagaagatggcacaggccaaggccagcggatgctttgccgtggctatggacgtggatgcagcgggtctgcccttcctgaagaacatgaccccgcccgccggcagcaagagcgtggaggagctggccgagatcgtgcagctggccgagcgcccctttatcgtcaagggcgtgatgaccgtcaagggcgcactgaaggcaaagcaggccggtgccgcggctatcgtggtgtccaaccacggcggccgcgtgctggaccagtgtcccgccaccgccgaggtgctgccggagatcgccgcagccctcaagggcaccgacgtaaaggtgctggtggacggcggcatccgcaccggtgtggatgtgttcaaggcgctggcgctgggcgcagacggcgttttgatctgccgccccttcgtgaccgctgtctacggcggcggcgcagagggcgtgaagtgctacatcgataagcttgccggagaactgaccgacaccatgcagatgtgcggtgcccatacgctggctgagatcaccccggacatggtgcgggtctgaggtttctgttataagtaataaaaaggagatgcccggccgggcatctccttttttgttacttcaaagtgccgtccagcacctgctggtaataccacggcttcggggcgtggaaggtcttgccgctgaggaaggcaaagtccggctgggtgaagcggggcatggtcagctcccatgcgcacagcgcctgatacttcagcttcagctcgcggttggcgctgttgttgccgtacttgctgtcgccaaggatggggcagccgatgctggccatgtgggcgcggatctggtgggtgcggccggtgatcagctgcaccttcagcagggcaagacggccggagacggcgatagtctcgtaccgggtctctacctccttggcaccgggctgcttgtcctccacgatcttcacgatgccgcggtcggcgtccttcagcaggtagccgcccaaggtggcgtccggcggcatgggacggccaaaggtgacgcagaggtaggtcttttgcacctcgcggttcttgatagcagaaaggaacagctcctcagcctccggggtcttggcaatgatcacaaggccgctggtgccggtgtccagccggtggcacaaggcgggggtgtacaggtcgttctccttgtactcgccctgcttgttcaggtacagcagcgcacggttcagcagggtgtcgtcctccgggccgtccaccgcaacgccggcaggcttgttcacgatcaagatctgcgggcagtcatacaccacctgcgccggggtgcgggcgttcttccacgcggggccttccacccggcggtcggcgtccagaacgtcatccagaatgaacagcttgatctcgtcgcctgccatcacgcgggtggaaagcggctgttttttgccgttcagcttgatcttgttctcccgcagcgccttgttcagacggccgggggtcagggcggggtactgttgggtcagataattgtccagccgggtgggggcaagacattttacttttaaaattttcacgggaaattcctctctatcttaaaatcagttgcaatagaatgggttcttgattcgtttttattgtagcggaacggaaacgttccgtcaagcaagagaaagaaggttttcgtatgagatggaaccataaaatagtgacacttactgtgcttttggctattggaataacaatggtgggctgtggggcgtccagttccacggctggaagcacagcggcttccacggcaagcacgacatcttcggaggcgcaaaaaacggaagtacacccaatgcaaggtgttttactgagtgacccactttcggatggcacttatcacatcagctttgaaagcgataaagtatgggtcggtgaacgcaagaataccatcaacaatgctgttgtatacgactatgaccggtacacagccgcagatattgaagcattgagcgaaggagataccattataacacatctaaacgggacagaagaaattacagccctaacagtggaaagcgttgagagagaaaacaactatgtgaccatcaacggtggaatagaagaaggtggtattgacttatgcaaagaggatgaccactaccggactctgacatgggatgattttcccgcttattatgaagttggagtggctaagcaacttgttatggcagacgatatcgaactatcggacggtgcagcagactttgaagccgacccagtgatcgtaaagggagatcggacggtttgtgatgcaatgagcaatgaagaagatgcttatgggtggaatgcaggaaacacgaccgtgaccatccaaaacggcgagataacccgtgcagaccgcatctgggtgccgtaaattttgctcaaaaccgttgacaaacgttttgcgtatgctataatttagctgtacgcaaaggggcactgcgctgctttgcggaatgtaaaattatgacagatggcaatgatggggtcagaaatgcacacaccaccgttcagagagagcgcccatggctgtaaggtgctccggtcgggatcatttcgcgccaccccggagcttccggcgaatgtaaaccggacgctgcgcagcgttaatgcgccgaaagcggcaggggacaagtgatcctttgcaatttgggtggtaccacggagtttgatgcacaagcagccttcgtcccttttgggatgagggctgttttttgttttttctccgtgccgcccctctgccataacagcataaaaacggcgcataagcgccaaagacgattgaggagagaaagatctatgcaatggaccggtttgaatgaactgcgcgaaaagtacctgagcttctttgaaagcaagggtcatctgcgtctggacagcttcccccttgttcccaagaacgaccccagcctgctgctgatcaacagcggcatggcccccatgaagaagtggtttctggcacaggaggagccgccccgtcatcgcgtgaccacctgccagaagtgcatccgcaccccggatatcgagcgcgtgggcatcactgcccgccacggcaccttctttgagatgctgggcaacttctccttccaggattacttcaaggacgaggtcatcccttgggcatgggagttcctgaccagcgatgagtggatggcgatccccaaggatcgtctgcacatctctgtctatgaggaggacgatgaggcctacgatatctggaccaagaaggtcggcattgccccggaccacatggtgcgtctgggcaaggaggacaacttctgggagcacggctccggcccgtgcggcccctgctccgagatctactttgaccgcggccctgagtacggctgcggcaagccgacctgcggcgtgggctgcgactgcgaccgctatatggagatctggaacctcgtgttcagccagttcgacgccgacggcaagggtcactacgagcgtctggcacgccccaacattgataccggtatgggcttggagcgtctggcctgcgtgatgcagaacgtgggcaacctgttcgaggtggataccgtgcagagcgtgctgcatcatgtggagcacattgcaggcaagacctacaagcaggaccccaagaccgatatctccatccgcgtcatcaccgaccatatccgcagctgcacctttatggtgtctgacggcatcctgccctccaacgagggccgcggctatgtgctgcgccgtctgctgcgccgcgccgcccgccacggccggatgctgggcatcgaccaccccttcctcgtggatctggtggagactgtcatccagtccagcgagtccgcttaccccgagctgcgcgagcatgacgcctatatcaagaaggtcatcggcaccgaggaagcaaactttgcccgcaccatcgatgccggcatgaacatcctgaacaacatgatcgaccgtctggagaaggcacaccagaagctgctgagcggcatggacgccttcaagctgaacgataccttcggcttcccgctggatctgaccaaggagatcgccgccgagcagggtctggagatcgacgaggacggcttccatgcagagatgaagaagcagaaggagcgcgcccgcgccgagcgtctgaagaagaacatctccggctggagcgaggatctgttcggcgcactggaagccgagcccaccgtctttaccggctacgacaccctgactgacaagggtactgttgtggcgctgagcgatgaagagactctgactgatgccattgccaccgacgaggaggcaaaggacggcgtgctggtggtgctggataagacccccttctacgctgagatgggcggtcaggctgccgaccacggcgtgctgaacggcaccgagtgcagcctgcgtgtgctggacgtgaaaaagacccccaagggctactacgtccacacctgcgtgctggaaagcggcattgtgaaggtgggcgatgtgctgaccgcacaggtggacaagggctaccgcatggccattgcccgcaaccacaccgctacccacctgctgcaggctgccctgcgtgaggtgctgggcgaccatgtgcatcaggcaggttcctatcaggatgcctccatcacccacttcgactttacccacttcagcgccgtgacccccgaggaactggcacgggtgcagaagatcgtcaacgataagatctttgactccatgaacgtcaccgtgcaggagatgccggtggaggaagccaagaagctgggcgcaatggctctgtttggcgaaaagtacggtaaggtggtccgcgtggtggacatcgagggctggtctaccgagttctgcggcggcacccatgtcaagaacaccgcccagatcggcggcttcaagatcgtcagcgagtcctctgtggctgccggcatccgccgtatcgaggctgtcaccggccgcaacctgctgatccgtgcaaacctgcaggaagctatgctgcatgatgtggcgaacaccctcaaggccaataacgtggcttctctgcccgcccgtgccgaggctgtgatggccgagaacaaggccatgagccgcgagctggaggagatgaaggcaaagattgccgcttccaaggtggacagcctgttcgacaatgccgaggaagcagacggcgtgaagatcgcttctgcatactttaccggtaccaccggcgacaccctgcgcggtatgtgcgacagcatccgcgacaaggccgtgaaccccgtggtggctgttctggtgggcaaggccgaggataagatcaccatggccgttaccgtgaataagctggcacaggaaaagggtctcaaagccggtgtgctggtcaaggagctgtccgctatcgcaggcggcaagggcggcggcaagccggactttgcaatggcaggtctgaaggacgagaccaagatcgatgaagcactggctgctgtgagcgccatcgtcaagaaggctctgggctaaaaaggatccatgtccccgcccggtgccggatgcgcgccggggcggcgggcttttgtagaagcaggaaggagtgttccccatggaagattgtctgttttgcatgatcgcagagggcaagatcccctctaaaaagctgtacgaggatgaccaggtggtggcattctacgacatcaacccgcaggcaaaggtgcatttccttgtggtcccccgcaagcacatctcctctgccgctgcgctgaccgaggaggatggtgctctgctgggtcacatcttcgccgtcatcgcaaagctggccaaggagcaggggctggaaaacggctaccgcatcatctccaacgtgggcgaggacgcaggccagaccgtgaagcatctgcatttccatgttctgggcggcgaaaaactgcctgtctgattccaatacgaaagggagattttgattatggctgaaacttataccctgcacgttgcaggcctgacccgtgagctgaccatctgcaaggtgaacgaccacatggacattgccgctttcatcatgctgggtgatgccgagctgaccgtggccgccgctgcggagctgctgaagaagtgcccggattttgatatcctgctcaccgccgaggccaagggcatcccgctggcgcacgagatgagccgtcagagcggcaaaccctacatctgcgcccgcaagggtgtcaagctgtatatgccggaccccgtggtggtggaagatcagtccattaccactgccggtaagcagaagctggtcatcgaccgcaaagagctggaaaagatgaacggtaagcgggtgctggtggtggacgatgtcatctccaccggcggctctctgaaggcgctggacgcgctggctgaaaagacccagtgcaccatcgtgggtcaggccgctgttctggccgagggcgatgcttccgagcgcaaggatatcatcttccttgagccgctgcccctgttcttccactaagctgggatgcgccgcccgctctgcgcgttctgcgccggaatgatgggccttagtttcctatggacttttttgccgcaaacggagctttttatgccgtttgcggcattttttgttgcctttttgctgctgctctgcatcccggatggcagccgcaagctggcggtctgcctgctgctgggcgcactggcggggctttgcgcggtgtacactacaaacgcccggctggagcgtacccgggcaaattacgccgggcgcaccgtgctgctgactgccgaggtggagcgcgcggacagcacctatttttcggacaccgtggacgcgaccctgtgggtggaaagtgtgaacggcagacgtgcgggcttccgcatagcctgtgcagagctacccgcctgcgcggcagggcagcgggtgcagggctggttcacgctgcaacaaccggacatggaagaacggatggcgcagtacgcggacggcatcgcgctgcaggcagagccgttggcagaaaagccgcagcttaccgtgctgggcgagagcggcagcttccgtgcccgcacccaccgcttgcagcaaaaactgagcgagagcctgcgccgtgccatgcaccgggacaccggcggcgtgctggctgccatgacggtgggcgaccgcagcgggctttcggcgcagctgcgcagcgcctaccggggcgcggggctttcccatgtgctggtggtcagcggaatgcacgtttccatcctgtgcggggatatcctgagcgttttgctgccctatcgctgggagcagagctaccgccgccgcagacggcgcacggtctggaaaagtctgctggcgctggtgctgatgggcgtgaccggctttacaccctcggtgcgccgcgccgccgtggcggtgtgggtcagcgccttgggtgtgtgggtatggggcccggcggatactctcacctcgctggcggcggcaggcatcctgatgaccgccgtcaacagctatgcggtgtgggatatcggttttgagctttcctttgcagcagtggcgggcacggtggcgggctctgcctgcatccgccggatgcgggatgcccacgacagacgcttttggatcaaagccggggagaatctgcaaaagccggtcaggcgtccgtggttcaacaggctgccggagcgtttgcagggtcttgcagagagcgcctgcattgccgcctgcgcctcggcggctaccttcccggtgctggtgctgcggggcttgagcgtcagcgtgtgggcgatggtctccagcattgcggtgctgtggatggtgcagccgctgcttttgctggggctggcagtggcttttgcggggctggtgccgtggctggcaccggtgcacggggcgctctcccgggcggcagacctgctcacagggctattgaacggctgggcggtctggctcagcacaaagcccggtgcatccatctactttgataccgcctacgcggcgctggtctgtctgctgctgtgcgggcttggggtgctggctttccgttggcgggtgcgtctgcgggtggctctgccgggcatcctgctggcagcggcggtgggcatcgggctggggaatgccctcagccgggacgtggtgcacatcgaccttgtgggcagtgcacaggcacctgcggtagtgattgcccagaacgaccgggcagtggtgctgttccggggcggcagcgccgcccagcgtgcggtggaaaaccagctggcgcggcggggcgtgcgcaccgtggagctggtggcagacctgcgcatgaacgcaaaaactgcctgcaccctgcccgcgcagcagggcatccgggcagagcgtctgccggtgaacacagcacgcaaactgcgctgcactccggcggcggtggagctgctgcgcacccgggaagggtgtctggtacggctgagcatcggcaaccggcagtttgtgaccttaagcggcagggcagagctggcgcagccgctgcaaacggagtggctggtggccacaccgaaaaagccggagacggtacagtaccaaaaactgctggcgctgcgcagctacagctggatggcaccggaaacgcagtacaccgcctccctcagcctgcgccgcaccggcggtgaaaggcttgagtgatgctttgcaatccgggccgagtgtggtacaatacaaagagcattttataacaggaaaggggcatttgcatggccacggaagcaaaactccggcagctggccgacaagggctgcccggtctactatttttattccagcgagcggtatctggtgcggcaggcagtggctgcggcagtgcgggtgctgtcggcagacagcgacgaggacgccaccatcctggacggcgctgccccggagctggagcagctcatcatggcggcgggtaccatctcctttttcggtacccggcgcgtggtggtgctgccggaaatagaccccgccgcctacggcagcaaggacctggacgagctgtgcagcaccctttccagcttggaaaacgccgtggcagtgctgggcagcgtgttcccgctggagcgcagcaagctcaagctgggcaagcaggcgcaaaagctgcaggcccagtgcaaagccatcggctacgcagaggaactggcaaagccccgcccctttgaactgaaaaatttgatgatggagcgcgcaaaggcgcagggcacagccctgccggacggcgccgccactgcattgctggagcgctgcggcgaggacccgtttctgctggaaaacgaggtggacaagctttgtgccctgtccggttaccagaccgtgagcgcctccatggtggcagagatgggcacggtaagccttgaagcggacgtgttcgagatgatccgcatgatcaccgccaaaaacgccaccggagcctgcaaaaagttacagaccctgctgcggctgcagcaggagcctatcgccattacagccgccatgatcggcagctatgtggatctgtaccgggtaaagcttggggcggcaaagcggaaaaattacagtgcggtgcacaaggattttggctataagggcagcgactaccggctgaagcgctcggcagagactgccgcccactacaccctgccccagctggaagcctgcttgcaggtgctgctggagctggatcagagcctgaaaagccagcctgtggcggcgcagacactgctggaaacagcactgtgccgtctggcgctggcggggagcggaagatgatgcaaaacgagatgatccataccgaccgcgtgctgatcgtggagggcaagtacgatgccgtccgtctggcgcacctgaccgatgccatgatcctgctgacggatggttttggcatttataaagacaaacagcgccagcagctgttccgggcgctggcgcagaaaaacggcctgatcttactcacggattcggacgcggcaggcttccgcatccgcaattacatcaccaacatggtgggtgcgcagaacgtggtgcaggcctatgtgcccgccatccacggcaaggaaaagcgcaaggcgcagcccggcaaggagggtctgctgggggtagagggcgtggacgacgcccttgtgcggcaggcgctgctggacgccttgggcgtagaagccggtgccgcgccggtgcgcccggcagggcggcagatcacctacaccgatctgtacgagtgggggctttccggcaagcccggcagcgccgagcgcaaggccagactcttgaacgcgctgggcctgccgccgcgcctttccaaaaaggaactggtggaggcctttaaccgcctatatacttttgaacaactggacgaattgcagttgaaaattttgcgggagtgaaaaactaactgtttttgtcccacgcctgccgcagcagttccagcgcgtgggtctccagccgggaaacatagctgcggctgatgcccagcagcccggcggtctccagctgggtcaggggcggctgccctgccagcccgtaccgcaacagtaagatctgccgctcccgggcaggcagagtgtccagcagctgccgaagccgtcggacatcctcctgccgctcacagctgtcctccatgcaaaagccgtcctgtatcacgtctgctaaggtcagagccgagtccccgtcggtctccaaagcttcctgcaaggagacggtctgcccgctcttgcgctcccgccggaactgcatgcggatctcgttttcaatgcagcggcttgcataagtggaaaaccgcgccttgcgtgtggcatcaaaggtatctaccgctttcatcagcccgatggtgccgatggaaacaagatcttcctgatcgcccggcagggcgtaatatttttttacgatatgcgccaccaaccgcagattgtggcggatcagcttttcccgggcggcggcatccccggcgcgcagggcgctgaaggcggcagcttcttcccgggctgtgagcggacgcggaaagcagccgctttccagatggagcgccagaaacagaaattttgtggcgaaaaattgcagtaaggtcagcagcacacgatatccctcccggtacatagttgttagattgtatgagccggggtgcgaatagttgccggagaagccttttgtgcgcagcagcttttctgcgagggaaaagcgtggtatactgaaggggataactcggaatttgcggaggaacatctgaccaatatgaatatatatgatttttggaaagcagtgctcgatcaaaatgagaacgaaatcagaaagtattttcagaacgatgcctatataaactggcattgcaccaatgagcgatttaatgttgatgaatttattattgctaattgtgaatatcctggtgattgggagggtagcgttgaaagagtcgaaatgctgaatgacctaatcgttacggttgtaaatgtatatcccaaaggcagaaactcttcctttcatgtcacgtctttcataaaaaccaaagaggataaaattgtttcaatggatgagtattgggcagacgacgggaatgccccacagtggagattagacaaacatatcggaaaagcaattagataaattcccatttatcgagtgacgaaaacaatacatccttctgcggacaactccaaacggttgtccgcttttttatacgctgaaatctgaaaaaagacaaaatgccaagtaaaactgaaaaatatctcatcttttgccgctgcttttggcagcacaatatattgctttaaaatttgtgcattttcaacagatgcaaagtgaccaatgatttcccgcgctagttgactgaacaccgatgtaaagaccctgtacagcatcttgctggaccgcatggggctatccgctaaaaacggattgataattacgagattctctaccgtggcaatcttccgaccggaaagcgcagcgttcctcaaccggaactgttggagcagctgtatcagaaattcaactgtgctcagcccatggattatcacggccacagcttgtctgtcagcgatgttatcctgctgaatcaggccggaaaaatatcggcacattacgttgacagcatcggcttccgggaattatctggttttcaggataagcaggaacgatcttcggtgctgagccaactcaaggcgaaatgcgatatgccggaatgcaatcccacaaagtgccggaaggggaggaatgaccatgcaatttaaccatgatgagctgatgctgatgatgctctacaataccggcacccggcaggggctggtgtgggagttgcggctgatgcagtgctacctgatgccggatgaaactgctttgcgagaactgtcagagcaggtcattgaaaagctgaaacggctgacggatgccgagtttgcaggactggaatttccaatgaactgatttttgccgcctgcgggcggcgtacataagcgctcttacaatgctatttggtatggtatattgaactcgacaactcggaacatacaaactcttgacagtaaaactcctatatagtattattaaaaaactactatataggagcttttgcatgaaaacaaatggcggatttcttgtcaccaaaataaaacaacttggagaccggatttttgaaaaaattctcagcgaaaaaaatattgatgcgtttaatggagctcaaggacgtattctttatgtgctgtggcaggaggatggtatcccaatcaggtcactctcggtcaaatgcggattagcgataacatctcttacgacgatgctggaaaaaatggaaaatcaagggctgataagacgtgttcagtctgaaacggataaaaggaaaacactcttgtttctgactgagaaagcacattccttaaagggcgagtacgattctgtatctaacgagatgggaagtatttactacaaaggtttttcagaagaagaaattgctcagtttgaggaatacctcgaccgtatcagaaaaaatcttgagggttggcaggaatcatgagtatttgtatcaaagagcagattcaaaacatgaatatcgtcattggctgcacagtggggtgtacatattgctatgcccgcaacaacgtgaaccgctggcatatgattgatgacttcactgaccctgaattctttccgggtaagctcaagatgatggaaaagaaacgtccgcagaactttcttcttaccggcatgagcgatctctccggatggaagccggaatggagagacgaggtatttgcaaagatccgtgaaaatccacagcatcagtttctgtttctgaccaagcgccccgatctgctggattttgataccgatctggaaaacgcatggtttggtgttacggtgacaaggaaagcagaactgtggcgtattgatgcccttcggaaaaacgtcagagcaaaacattaccatgttacctttgagccgttattcgacaatcccggcacagttgacctttccggaatcaattgggtcgttgtgggcaccatgaccggagctcagagcaggaagattcatacggagccggaatgggcatggtctctgacagaccaggcagataagctcggcattccggtgtttatgaaggaagaccttgtccctatcataggggatgaaaatatgattcaggaaatgccggaagcatttaataaagtgttagaggtacagaaatcatggaagaagtaataaatggaatcctcattcgtgaggtggaaacaaagaacatcatgactaagtccagtctgccggtaggcggttactcggtcaatccctatgtgggctgtacacatgcctgcaagtattgctatgcttcttttatgaaacgctttaccgggcacaaggaggaatggggcactttccttgatgtgaagcattggccagaaattaaaaatccgaagaaatatgccggacagcgggtggtcatcggttctgtgacagatggctacaatccacaggaggagcaattcgggaataccagaaaacttctggagcagctgatcggcagtgacgcagatattctgatctgcacaaagtcggatcttgtggtacgggatattgatctgctgaagaagcttggacgtgtaaccgtttcatggtcgatcaacacactggatgaaaatttcaagaacgatatggactctgcttcgagcattgagcggcgtatcgctgctatgaagcaggtatatgaagcaggtatccgtacagtctgtttcgtatccccggtatttcccggtatcacggattttgaagccatctttgagcgggtaaaagatcagtgtgatctgttctggctcgaaaatctcaatcttcgaggcggtttcaaaaagacaattatggattatatcgccgaaaaacatcctgatcttgtaccactttacgacgagatctataacaagcataaccgcagctactttgaagcacttgaagtaaaagctgcggaaatggctaagaagtatgattgtccctttgtggataatgaaatgccttatggaagagtcccgcaggggcatccggtaatcgtagattatttctatcatgaggaaatccgagggacagagaataccggaaaaagaaatcgctaacttccagtttatcaaataagtaaatcattccatacctctgcgggcagcgatgaaacggctgcccgctctttttgtaccctgaaaccgaaaggaggctttaaatgccaaacaaaaccgaagaatatcttgcacttgcctgcaaaacggcagacagcttttcgcgacagtgggagcactgggcagaatttctgatcacagcggcacggctgtacaaatacagttacccggatcagctgatgatctatgcccaaagaccggatgccacggcctgtgccgagtatgatgtatgaacagggacagctgaaatcaaaggcagacatgttcactcagcgcaccattcggccggagcgtgtcattaccagtgtgaattctcccagtgaagtgcttgccgtgtcgattggcgaacatggtaaggtagacctgccctatatggcagaacttctcggcacacccggcgaatatgcgcagattaccggcgaattgtccggcgttattttcaaagatcccaatgctgaccctgccgacccggaagcgggctggcagatggcagatgagtacctgtccggcgatgtccgggcaaagctgcggatggcgcagtttgcggcagagaccaacccggaatttgccgtcaatgtggaggcgctgaccaaggcacagcccaaagagctggaagcctccgaaattgatgtgcgcttgggtgcaacgtggctttccccggacattatccagaagtttatgaccgagaccttccaaattccctactatctgcgccgggcggtgaacgtgcgttattctccctataccgcagagtggcgtgtggagggcaagactgccaccgggcgcggcgacattatttcgtctgagacctacggcacatcccgtgccaatgcttacaagatcttggaagaaacgctgaacctgaaagacgtccgcatctacgacaccattgaggatgccgatggcaagcccaagcgtgtgctgaacaagcgggagaccatgctggcgcagcagaaacagcaggtcatcaaggatgctttcgccaactgggtctggcaggaccctcaacggcgcattgcgctggtaaaacagtataacgagctgttcaactctacccgcccccgtgaatacgatggttcccacattcattttgtgggcatgaacccggagatcaatttgcgagagcatcagcgcaatgcggttgcccatgtgctgtatgggtacaacacccttttggcgcacgaagtcggtgccggcaagagttttgagatggcggcttccgctatggaactgaaacgtctgggcttgtgccagaaaagtctttttgtcgtaccaaaccatttgacggaacaatgggccagcgagtttttacgcctgtaccccaatgcgaagctgctggttaccagcaagaaagattttgaacccggtaatcgaaaaaaattctgtgcgcgaattgcgaccggcgactacgatgcagttatcatcggacacagccagtttgaaaagatacccttgtccgcagaacgacaggagcgtctgattcaggaacagatggatgaaatcgaggaggccatcgaagaagcgaaagcgcaggttggcgagcatttcacggtaaagcagctggaaaagctgcgcaagtctttgaaacagaaattggaaaagctgcaaggcacagaccgtaaagatgatgtggttacgtttgaacaattgggcgttgacaggctctttgtggacgagtcacatttctacaagaacctctttttgaccacaaaaatgcggaatgtcgctggattatccaccagcgaagcccagaaatccagcgatatgttcggcaagtgtcgctatctggatgagatcaccggcgggcggggcgtggtgttcgccacgggcacgcccgtgagcaattccatgaccgaactgtacacggtcatgcggtatttgcagtacagcaccttgcagcagaaaaagctgacccacttcgactgctgggcatctacctttggagagaccaccactgcaatcgagctggcgccggagggctatactttaataggacgataaacttgattgtcctaaattgaaagattccataagaaaggaggtagaacaaatgcctaaagaaccaaaaatcaccgcactctatgagcgtttgtcaagagatgatgatcttgctggtgaatcgaattccatcaccaaccaaaagaaatatctggaagattacgccaaaaagaacggttttaagaacatccgccattttacagatgatggcttttcaggtgtgaatttcaatcgtcccggctttcaatctctaataaaagaggtagaagcaggaaatgtcgaaacgctgattgttaaggacatgagccgcttaggacgaaattatctgcaagtcggtttttatacggaagttctgttcccacagaaaaacgtccgattccttgcaatcaacaacagcatcgacagcaacaatgcttcagacaatgattttgctccgtttttgaatattatgaacgaatggtatgccaaagacacgagcaataaaatcaaggctgtattcgatgcccggatgaaagatggaaaacgttgcagcggctctattccgtatggatataaccgtttgccgaacgacaagcagacacttgttgttgatccggtggcatccgaagtcgtaaagcgcatttttcttcttgcgaacgaaggaaaaagcccacggacaatcgcagagctgttgacagaggaaaaagtcctgattcctgctgcatacgcaaagaagtatcacccggagcagtgcaatgggacaaagttctccaatccgtacctgtggggcacctcctccgtaagaacaattttaagtcggcaggaatatctgggacacactgttttacgaaaatctgtaagcacaaatttcaaacttcacaagagaaaagaaacagatgaagatgaacagtatgttttccagaacacgcatgaaccgattatatcgcaagaactttgggatagtgttcagaaacgaagatgccgagtgaatcgtgcttctgcttggggaacgcacaccaaccgtttaagcgggtatctgtattgtgccgactgcggcagaagattgaccttgcaaacacactacagtaaaaaggatgggtctactcaatattcttatcgttgtggtggatatgcaagtcgggtgaatggctgtactgcccattcaatcagtgccgataatgttgaagccctgatattggcatcggtcaaacgcttttcgagatttgttctaaaagatgaagaaaccttcgctttggaactgcaatcactttggaaagagaaacgtgaagaaaagccgaagcagaaccaatcggaattgaaacgttgtcaaaaacgctatgatgagctttctgcccttattcgcagcctgtacgaaaatcttatggctggactgctgcccgaacgacagtacaagcagctgatggcacagtatgatagcgagcaggcagaattggaatcgaagatggaaacgatgaaatccgaaattgccgaagataagtcaagttctgttgatattcaacatttcatttcgctgattcgtaagtgcaaaaatccaacagaaatctccgattcaatgtttaacgaacttgtcgataaaatcgttgtttatgaagccgagggtgcaggcaatgcccgcacacaaaaggttgacatttatttcaactatgtcggccaagtcgatattgcttataccgaggaagaacttgccgaactgaaagcgcagaaggagcaggaagaacggcagcgcatggaaaagcagcgcaaacgtgaaaaagcctaccgagaaaagcgaaaggcaaagaaaatcgctgaaaacggtggcgagatcattaaaaccaaaacgtgtccgcactgcgggaaggtgtttacacctacgagcaaccgacagcttttctgctcaagggaatgctggaatcaggcaagactggagcaaaagaaagcggatagagaagccgagagaggaactcactactaccggcagcgcacctgtgccgtgtgcggtcactcctactggcctacacacagccagcaggaattttgttccgatgagtgcagaagaatcaaccacaacaagaaaaccttggaattctatcacaagaaaaaaggaaatctaaaacaagacccagaagcaaccccaacgccgaaaccaaaggaggataatgcagcatgactaccttaaagaacacgctccacaaagaacacgctccacgacagcaacaacggtctggactacaccctcgtcaacgaccactatctgccgaacctgaccacagcagccccggcagagcaccccaccgggcggtggggtcgcctacataagatgtacctgaaggaacagcatcccatccggtacaaccacctgctcctgtccggtgaactgggcggctaccttgccaagctggacaagcaggccgaggaacagcttgcattgaccatccggcagatgcaggaagccgagggcgtgacagaaaccctgaaagctgccgatcaactggaatgggtgcgccagatgaacagcatccgcaaccgtgccgaggaaatcatccaaaaagaactgatctttatctaaggaggtgcctacgatgactgtgctgaaaccgatgctgaaacttgcccttctcccgctgcttctgctgctgattttggcgcagtgggtgggcatcttcctcacgaccttctccactgtcctgacgaatctgctggcgggactgttcttcttcgtggctctggcaagctgggtcatgaagctggcagacggcggcgaagtcctgaaaatgctgattaccgcatttgtggttttcgtcctgccttacatagcgatagctgctatcgcaaaaatctcctttttcgctgaggaactccgggattttctccaatcctgagttcaagaccgccctgcacaacgcacggcggtctttttgctacatcgggtctgcacagggcaggcccttttttaatacggaggaacaagcctatgaaactgacgtttgaggaaaagaagctgctctacacctatggctgcgccgatctggaactgacccgcaagcggctgtacgagattgccgggctgacggttgatcctgatctgaaccgactggtgttcgatttcgtccgcaaactggaggacgaaacgctggcagactggtacgaccagatgttctactttgtccgtgccgagatggagtgctacaccaatatgctgctcctgatgcaggacatcgaggaggacaaggaatggaggaaggaagattttgtcgagcccgatgacaatgtttaagctggaaaccatgatctacgccagcgaggacgggacaagcagcgtatttacgctgaatcccgccttgcagaagcagcttgatgcccttgcagcgcagcacccggaggtgtgttgccgcaaggcaaagggagaagccagcggtgtgacgtatcaggtcaggggtgctgcgctggctatccagcctgtgcggggctcctgaaagcgataaccgatctgctatggtaaaataatctccaatcggctaccgtattcctgcaagtcatcattggtttgtgtaaacacaaagaagcggcggctctgaaaattgagccgccgcttcaaaatgggcgcgcggatatgtctgctgtacgacgacttttttcttttgccgtcgtgcggcaggtcattccatatttatgaaacttggtgcttggcaaatacacggcgagagatacctgccccaactcccaaaaagagtagtgctgccgggattgcccatatcgcatacagcataccgttactcatttgttccaccgacaggagcgagatagccagtacatgatagataggaagaagtccaaccaatcggaacaacggatttgcttctgtgatcggcagcaaaaccgggaacagaaaaattgccatcactgcaaccaaagctacaatctgatttttactgattgcagataggaacagtgtaattccagtaacgctgagggtacaggtaaatgccaacaggatttgatatttgagtaatgttccacaagtgatattgaaaggaatgaacccttctacatagtcgctgggagcgaatagaatactacaatctagcccttccgttccgtaaaagataagagcaagaagcaagttaaaagccgcaaccagcgcagtagtgagaatggcgctaagaatacccgctgctacctttgcagtagtgcatttggttttgccgtatttgcttgtcaatatgatattgtcaacgccttcatactcgccggagaaaattggagcaagcatgatgataaccgcaagagcaagcgcgacaaaaacccgcaccatgtttcggctggtggaaagccaaccatccacatagccaattttgatttcttcattgccaaacacatcagaaacacttaatccgttccattttccctcttcatcggaaaaccgtgaaaaggctgccgattgcatggcgttttgataaacatagattgcactcaatccatgtaaatctgatgtcggtgcaaaatcagacatcatttgctgcactttttcgtctgtcagaattcctttatatttcgctgcaatttccttgtcgatttctactgctgttttgccagtaccttcaccgatattttggtcaaatgcatatttgttttgaaaggtggaaaaggatagcaaggcagagaacaggataattccaattagagcgatgagcgccaaacgctttgaaaacactttccgcagttcaaaaagaatcagttttttcattcttcacagccccctttgaaatagaacaggtacaggtcttccaaagtaggctgtacccttaccgcattttccataggcggacgatctccaataatccgtaagatcgtctggtttccactgatgttccgcagattacttgtattgtaagcagctgcgtttttttccgcataggcagtcggaaccgtacattcccatacttgaccgtcgatttcagaagtgatctcctgcggatttccaaaatgaatgatttgcccggatttcatcataatgatttcctctgcgataaactccacatcggaaacaatatgcgtagacagaattacaatgcggtctttggaaaaggcgctgatcaaattgcggaaacggacgcgctctttcgggtcaagccctgccgttggctcgtctaaaatcaaaatgcggggatcattgagcatggcttgtgcaatccctaaacgctgtttcatgcctccggaaaaggttttgattttgtgcttactttccctcgataagtctactgcttccagtaactcttttgacttcttatgcgccgccttttcgtccaagccttttagagcagaaacgtagcgcagaaagtcatacgctgaaaaatcggggtaatatccgaagtgctgcggcaagtagcctaaaagattgcgatagcgttcacccagccccacaatgtttttctcgttaagcaaaattctcccggaagtaggattttggatattgcagagcagacgcataagcgttgtttttcctgcgccatttgcacccagtaatccgtagacaccatttgttaaggtaatattcaaattgtccacagcggttttggagctaaacttttttgtcagcccaattgtttttaattccataaaaagcccctttctccatagggagcaaaaaaatactccccatgtattttcatggagagtatagagggaaaatatctactttttatctacaaggcaggagatttgaaataggcggatacatttgctccggttgcagtattttcaatcttcaaatagccgttatggtgttcacaaagcagcttgcaaatatataacccaagtccgaaatgctcggaatgattgctttcccttgtgaagtacggatttgcagctttttgtaggctgtctttatcaaaaccattcccatcgtccgatacggaaagcagcaaaccgttgtcatgcaaggtgaaagatattgttactaaagtccgggcataccgcacagcgttagaaatcaagttgttgcatacctgtgagataaatgcactgtcaagagatagctgcaaaacagatatgtcattttgtaaaatcaactcttttccgtttttcgtacaaatgatttttgcactgtcatacaaagaagataccaatggttgcaagccaatcaacttgtactccggctgcgtatcttccatacgcctaatgttgctcatactgcttacatagttttccatacggaaaatatgctttcccattgtggcggcggtttccctcgtttgggaattgtcgctagcttgcagcatttcgttatagccttttagtaccgtcagaggggtacgcaaatcgtgagcaaaagcggcgttgagtgcttttcgttcttcaacttgccgccacattttagagaaattgtccgcaagggttgtccgcatgatttcaaaggacgcgcaaagctgtcccaattcatcgttgttatcatagtcgattgaaaagtccaaatcattgttcgctattttttcagaagcagtccgcagttccgcaagcggctttttcagcctgtttctgtaaaatagcagcgcagcagcgataatacagaatgcagaatagagaggagttgcaacaatgggaagtttctctagtagcgcaatggtacgctcgtcctctttagacatcgggacgggcactgtcccgatgtaagcgccgtcgcccaactgtttcccctgctcattcgtcaaataatatttttcgccggacgggggataagatgctctgataccttcggcagcactaccacagatcgaaaaagtcgttacggatagaaagactgcgagtacaacaaaggcaattacatagagaacaaggctttttcggagagataaatagtgcttgcggcaatttacttgacccatttgtatccacacccccaaaccgtttcaacatatatatggtctgtatatgcagcaattttagtccgtatcctgcggatatgctctgccacaacgctgctgtccccctcgctgtcatagccccaaatacgctcataaatccgttctttatcaaagatctgtcctggattttgagaaagcagttccacaatatcaaattccctttttgcaagaccgacacgcttatcgccaaagaacaagcaacgttctgaatagtcaatcgtcaaatcaccggaaaacttgacttgtgcttcaaaattgtgtcgtgcttcccggcgcaggtgagcgcgtacccgcgcatcaagctctacgagggaaaagggctttacaatataatcatcaccgccaacagcaaagccttttaccttatctgtatcttcgattctggcagtcagaaaaaggatcgggcaggatatgtgatcacggatacgcttgcaaacttctaacccgtctgttccgggcatattgatgtcaagcaaaataatatccggttgtttttccacttgctttagtgcttctgcaccattgaaagcgggcaggacacgaaagcccttgctttcaaaaaagttaccgagcatagaaacaatatcgctttcatcatcagcaatcagtatctttgcattcattatgctcacctcctaacagcaaatatagcaatcatttttcaattatttatctattctcctagacgtattatattcgttatctcaaagaatacaaggcggtaaatatgaattataaaatgtttgtaaacgaataaaagtttttgaaaaaggagcgtgatgccatgacccaacccaaaaccgaccttgcctacctccgcaacgaaaaagccaaagcagagcagaagcagcgctcttgtcagcaccgagagaggatccttgaacgccagatgtcggagctgaaccggagagagcgtgtgcatcgtctttgtacccgtgccggaatgctggaaagttttctggtctgtccgggagaactgaccgatgatcaggtgatggaacttttgaagatctcgttccgccaaccggaagtcgtgctggctcttgcaaagatggtgcatgacgttcacgaaaagcagaacgttccgaaccccctatgaaatagggcgcaattatacacctcgtcgtcacttgctgcatatcgttcgcatctgtgcaaaagcacaaatgctcattcactccgcagttcctcctcttccccataaaatcatcttcgatgcttttccggggacccctttgtgtgaaattgcggtcttgcagacggctcgatgaaatcgaagctggcgtttgtacgccagcccgattccatcccaaggaaaactgcattttccttgcgctgctttgcagctatccttttgcggcttccgcctaagaccgaagcgcatggcactccgttctaaggcggcgagtacaaccgaatacgattccagaccgttcatcaagagcaatcttgctgggcggtctttttgtttgggggtgatgcctattccgtgtccgcatttcaaaatcaccatcgtcaagcgcagccaaggtcagtccgctgttgccggggccgcttaccagagcggcgaacggttgttcagtgagtacgaccagaaaacaaaattctacaacaagaagaaagaacttgtccacgccgagatcatgccgccgtcccatgcgccgcccggatatgcagaccggacaacgctctggaacgcagtggaagccgtggagaatcaatggaactcacagcttgcccggcgcatcgtgctggcgtttccggtggaagttccgaaagagcagtatctgtccatgataaaagagttttgtcaggagcagtttgtttccaaaggcatgatcgctgactttgccatccacgacaagggagatggcaacccacacgcccacattctgctgacgctccgggcaatggacgaacacggcaagtggctcccgaaagcccgaaaggtgtacgaccttgacgaaaacggtgagcgcattcagcttccttccggcaactggaagtgccacaaggaaaacacggtggactggaacgaccagaagtacgccgaggtctggcggcatagctgggaaaccatcaccaaccgctatctggaagctgctggcagaccggaacgtgttgacctgcgctcctttgagcggcagggcatccagcagataccgaccgtccatctcggccccgctgcacaccagatggaaaagcgtggagtggaaaccgttctcggcaacctgaaccgagatattcgagccgccaacagcctgatgcagtccatccgcagcgcaattcgtgggctgcaacgctggatcgcagacctgaacgaaaagaagcagattcttctggacgctctggaaaaggcgaaggaacccacgctgtccgatctgctggtggactacttcaacctccgcaacgagcagcgcagcgattggtctggcagggcaaaactgaaatgcactgtccgagactttgaagaagtcaaacaggcggtggactacctgaaagcccattcgctgaacaccgttgaggacttgaaccaagccattgacagcttaacccagaccgccgctcctctccgcaaacagttgaagcagaacgaaaaccgtatgcgggcaatcgctcagatcaaggacgctgccgccgtccatgccaagctgaagcccatccatgacatttttatcaagaagaacttcaagctgaccaaggacgcttacgccgcccagcacaaggaggaactggacacgttcaacaaggctgtccgtaccctgatgaagctgaacggcagcacagcggtggacttttcggcattggatgccgaattttctgcgctgcaatccggcagcgcagagctgcgcactcaattggaaaccttgcagccggacatctccgatctgaaaagtgtccgcaagtatattgatatggtgctgaacaagcagcagcttttcgcaccgggcggcaagaccccggaaaaggaatcggtgctgaaaaagctggaagaagccaaggcggcgcagaccacaaagaaaacggaagcgaaaaatcacatacaggagctttaaggagggagcaacatgacctacacccaagcccagatcgacaaagccaatgcggtggatttggaaaaatttctccgggcacagggcgaaacgctggtgcgcagcggaaaggagtatcgctggaaaacccacgacagcctgaccgtctgcggaaacaaatggtttcggcacagccagagcaggggcggctttcctgtggatttcgtgatggaattttacggcaagtccttccccgaagcggtgcagatgctgaccggagagccggacgaagcccagccggaggctgaccccgccccctctccggcgtttcgcttgccgctgcggaacgtcaccaatgccaacatcctgaactatctgacacaggagcggaaactcagcccctcgttggtgaatttcttcatcgctgccggagatatttacgaggattcctcccaccacaacgtggtctttgtggggcgggatgcagacgggcatccccgctacgcaagcagccgtgggattcaggagaagtttcggcaggatgcagccggtgcagaaaaggcgtttggctttgcccatcgtggcaccgacaaacagttgctggtctttgaagcgcccatcgacctgctgtctttcatcgaactgttcccgaaaaattggcagcaacacaattatctgtcgctgggcggggtgtcgggcaaagcgctgcggcagtttctctcggaacgcccggacgtggagcgagtgttcctctgtctggatgccgataaagccggagaggatgcctgcaagcggctggcggggctgctgccggacacggtgagcgtgacccgcatccagccctgcatgaaggattggaacgatgttctggtgcaccgggcagagatttcgaaccgcaattatttcaaaagcatcgtgctgaaagagccgtcaaaaccggaaacggtgaagatcatccgcatgagcgacgtggagctgaccccggtggaatggctttggaagccatatcttccttttggaaaactcagtgtactgcaaggcaatccgggcgagggcaagacttattttgccatgcaccttgccgctgcctgcaccaacggaaagctgttgcccaatatggagcgcatggagccattcaatgtgatctaccagaccgcagaggacggtctgggcgatacggtcaagccccgcctgattgaagccggtgcagaccttgaccgggtgctggtcattgacgacagcgaggtgcagctcaccctttcagatgaacgaattgaaagagccattatcgagaacaacgcccgactggtcatcatcgacccgatccaggcgtatctcggtgccgatgtggacatgaaccgggcgaacgaggtgcgccccatcttcatgcggctgggacaggtagcgcagcgaacaggctgcgctattttgctgatcgggcacctgaataaagccgctggaatgcagagcctgcagcgaggtctcggctccattgacattgccgccgccgtgcgtagcgtcctgttcatcggcaagctgaagcacgaccccaccatgcgcatcctcacccatgagaaaagctcccttgccccgccgggtgcatcgctggcgttctctctgggggacgagggcggcttccgctgggtcggcgagtacgacattaccgcagacgaaatgctgtccggcatcgagccgcagcgtgaaaccaagacccagcaagccaaagacctgatctgcgccctgcttgccggaggaaagcaggtgctcagcgaggacatcgacaaggcggctctggaaaggggcatccccggtcgaaccgtccgggatgcaaaacgggagctgggcgatgccctgaaaagcaagatcgtggaaggccgcaagaaggtcttttggatggaataagccatttgactggcagaaaaatttggctggcaagaaaatcatggtacacccacagttgccagtctgccagccaaattgggaaaatgacgataaaaggagaaatcgaatggagaatcagaattcgagttattcggtgcagattggcaaaaccacctttattgtgtgcgtgaagcagtccgaaaccgccaaaaagccgattgaaaagatgttcaaggatatgtgcaaacatgaggtcacacgggacttccttgcagacaacctgatgaatttagaaaaattaccgaaaacctcttgacgaagtctagcccgaaggcaccggataccgtgcacgcactcgttttgcgaagttcttcaacttacctgaactgatggcgatgttcaaagaagcggcggatatcaagaccagcgaccagttgaacctgccagtgccccaagctaaatttgaaaccgtagtggtcaagccttcggaaatccagcaggacatggtgcaggcgttgagcgaacgtgcagccgaagtccacagcggttctgttgacccttctgtggataatatgttgaaaattacgtcggatggccgcaaaatcggtcttgaccagcggttgatgaattccgctctgcccgatgaccccaacagcaagttaaatgcctgcgtcaacaacgtcctgcgcatctggaacgacaccaaggagcagaagctgacccagttgattttctgcgatatgtctactcccaagggggacggttcgttcaacgtctatgatgatattcgcaccaagctgctcaacgccggtgtgcccgaacaggagatcgagttcatccacaacgcagataccgaagcaaaaaaggcggcattgttctccaaagtgcgctccggcgatgtgcgagttttgctcggaagcacggcgaaaatgggagcaggcaccaatgtccagtcccggcttgtggcggtgcatcacttggacgttggctggaagcccagcgacatgacccagcgcaatgggcgaatcatccgtcagggcaatatgaataaggaagtcaaggtgttcaattacgtcacggaagggacatttgactcgtacttgtttcagacccttgagaataagcagcgatttatctcgcagattatgaccagcaaatctccggtgcgctcctgcgaggatgtggatgagcaggcgctctcttacgccgaagtcaaggcgctgtgtgccggaaacccgctgattaaggaaaagatggaccttgatgtgcaggtggctaaactgaaagttctgaaagctgaccatcagagccagaaatatcgtctggaagacaaattgctgacgcagttcccggcagatattcagcagcagagagcgcatatttccgcactgaaaaccgatgcggaaacggctgcggcccatccgcaggacagggaaaacttctgcgggatgaccatcaagggcatgatgttcgatgacaaaaagactgccggtgaacggttgattctggcggcaaaagaacttcccgacacagagcctgttgtgctgggcgagtaccgcggctttgagctttcggtgcgctatgagccggtccggaacgagcaacaggcggtgctgaaaggcaaggcgatttatccggtggcacttggtgccgactcgcacggcaatatcacccgactggacaacctgttggccggttttgatgagcgcattgccaatgcagaaaaccgactggagaatctgctgcagcagcagacggcggcacaggcagaagtggaaaagccctttccgcaggaagaagaactggcacaaaaatctgcacggctggctgaactgaatgcacagctggatgtggacgaaaaacatcacgagccggagatggaagaaacgccggatgaggaatctgcgcgcccttccgtgctggccgccctgaacgaaaagtcggataaggaggaaccggtcaagccgttccgcagctactcggaccgggatggtgatgcccgatgagagaaaagaggaacgagattttgatcctgcgcatcacaaaaaccgaaaagaatcggatttacgaaaagatgtatggcatgggcatccgcagtctgagtgcgtatatccgcaaaatggcattggatggttattgtctgaaccttgacctgccgcagctgcgccggatgtcgtacctgcttcagaattgcagcaacaatctgaatcaggtggcaaaacgtgtgaatgaaagcaatcagctttatgccgcagacattgaagatttgcggcatcggctggacgagctgattggcatcggaaaacagattctttccaaactgtctgaactttaacttttttccgcagagaggagctgcggattacatattgattgacatccttgcaatggatgcggagatacctttataataagggcgaaaggcaggtgctcgatatgaggttcatttttaagatggtcattcttccgttttcgctgcttacggctttccttgcgctgatgctgaaattgacattgaatctgtcggcatttgtgcttgcgctgccgatgctgtatatttttggctgcggactttatactctttattgtagggaatggacacagttcctgatcctttttgtggcagagttcgggtgctttttgctcatcgtggcaggaacggcgattgtggaagccgtcgagcgattcagcgaatggcttacggaactgtaatggagaaaacgatggataaagataaaatgctggattatttcaatgaccgtgaggcaacgctttttcgggatgaattgggaagcaatgcacggtatcacgaactcctgcagaaaaaactggcagcggaagacgcacaccggaaaatggtgggcgaagcagcatggaagcagtatcttcagctggatgagctctgcaatgagctggaaagcgtacgatatcaggcaatgtatctggccggtgccgctgattttgaaaagttgttccgtcaatcctgatggataatgtgccgccttcgggcggcattttttctttgcaataggggggtgatgatgctggcagcaacacggctgattgcgctgcacaaaaacaagggcaagtctgttgcggcttgcttgaaaagccgcaccgactatgcacaaaacccggataaaacggagcaggggcagcttgtaagcagttataaatgcagccccttgcctgtagatgaagaatttatgctgtccaagcggcagtacgaacttgtgaacggacgcaggcagaaaagcgatgtcatcgcttatcagatacggcagtccttcaaacccggagaaatcaccgctgaagaagccaacaaagtaggttatgagttggcgatgcgctttacaaaaggcaagtatgcttttctggttgctacgcacaccgaccgggagcatattcacaatcacattatctataactctacggctctggactgcagccgtaaattccgggactttttgctgtcggggttggctgtgcagcggctgagtgacctgatttgcctagaacacagcctgtctgtgattgaaataaagccctaccgggagcggcagaagcgtgtactttacccgccaaaagaaagcaaccgcgatcaattgtgcggtgtgattgacagcatccttgcggacaagccgggcagttacgaagaatttttgaaaaaactggaacagcagggatatgaggtcaagcgcggaaaattcacatcggtgaaaggtgtacggcaaaaacgattcatccggtttcggactttgggggcgggatacagtgaggaagaattgaaagcggtcctcgccggagaagcagagcattgcccgcggaaaaaacatccggtgcagaaacaaaaacttcagatgttggtggatattcaggcaaaattggctgaaggaaagggaggcggctatgcgcgttgggcgaagcggtacaacctgaaggagatgtccaagacgctgatttttctgcaggaaaacaaaatcgggagcatggatgaaatggaagaacaggtgcgtgctgcaacgatgcgctatcacgaactgggcgactccatcaaagctgcggaagcgcggatggcagaaattgcggtaatgaaaacgcacattatcaactatgccaaaacaaggtccatctatgaggcctatcgaaaagcaggatacagcaagcgattcttggaagcaaatcgggagagcattgcgttgcacaaggcggccaaagcggctttcgatgaggctgggctgaaaaaacttccgaaggtaaaagaactgagcatcgaatatgttgagcttctgaaaaagaaaaaagcagaatatccgagctatcggaaagcacgagagaggatgcaggagctgatgaaggcgcagaaaaacgtagaaatgttttttgcagacaacaggagcgaacaggaacagcagcagacccgataaaacgaaagtcaccgaggattcgatcccaatccgttttgggaaagaatcctcggtggcttttttagtttatatagcagcggtcctgcgtgacgagccaatcctcacataaccgctgcgcttcgtcttttgagcggcaggtgcagttgaaaagcctgccgtgcaaagaacaatatgtgtagtgtacctttgggatgccatcggaatctctgaaattgacacagcgttcttcaccgggcagcaggtagattgaatccacgttcggcagctccttttattcttgtttgatgtgcattgcacaacattgctattgtagcatgcccggttcaaaaaggccattgatgatttgaacaaagaaatgctctaaaattttctgtccgaaacaaacgctagtaaagttggataaacgccaactgattgtgtgtaaagaaatacacggcctttattctagtggtgtgtaactaacgccaatagaatgcgaggatgttatgaaaacacttttaggccaacgaatcagagaacaacgcaggaaaaaaggctggacaatggataaactggccgagaaagcagatctgtctgtaaactatgtgggtgatttggaacgtggggtgaagacgccaagtctggacactttcatccggatcgttgaagcattggatgttccagcggatacgctgatccgggactccgcagccccagcatcttatgtggcagatgatgagctgaaccggaagttgagccgtcttacaccggggcagaagaaagccgcaaccgatattttgaacgcatatatcgataacataccgtacatcaaagagaagtaaataggttacagtgggtgctgacaaaatcattgtcggcacttttttaagtgggtctgtgcccggcggatatatcactgaaccatgaactctatcaaaaaagcattcggcaggaacgcgcagcctgcagcggtacgatgcagatcacaaagggtttgggaattcccaacaagcattttgcgaagcaaaaatggcgtttgtataaacagacgccctgcttgcagaaagtggatttaaagattactgagagagaaaatagacgggttgattttgttcgaggttgagattatactataataaagtattgtttagctttcacttatagatggagagataacttatggaatatttatcaatcagtcaggtggctgaaaaatggaggctttccacaagaagaattaatgtcttgtgctcagaaggacgaattctcggagcaacgaaaatcggttcatactgggcgattccagcggatgcggaaaagccagctgatgcaagagtcaagagcggccgctacgtgaaggtaaaagaaaactaagaaaggggtcgtacctatggctgcaatcaatgatttaattagccagatccaagatgagactcttcgaaatagaattcaggaagaagtgagtaaaatggccaagcagaagaaattcggcttggtctttgaagaacatatgccggaaagcacgcctctctatgatatgcctatcaaaagcggctgtaacgttatgcgccgtgacagtaaggacgataaatccatctatgcggtctctctgggcggcgacagcgacacccttgcctgcatcaccggcggcattgccgaagccttttacgggatgccgcagaaactgcgggacgagactttaaaacgtctgccggaggatatccgggaaggatatgagctgtttcggtggaacatcggccagagataagacattcggagaaccaaggagcagatacaacacactcgtgatgtgaagtatctgctccttggcttttaataagactcaatggagggcgtcttgcatcggcctgaaaaatccgatatactgaacccagagagtatatcgaattttttgggaaaaggagagaacggtatggaacatctttatgaaaaggcactggaaagtgcggaatatatcaagacgcacacgaaaaagcgcccgaagatcgcggtggtgctgggctccggccttggcaagctgaccgcggactttacggacacggaagaactgtcctacaaggatatccccaacttcccggtatccacggtggcaggacacaaaggcgcattgttggctggcaagctgggggacacggaagtctacgccatggaaggccgcttccatttctatgagggctactccatgaaggaagtctgctacccgttctatgtgttcaagctgttggacgtggaaaaggtggtgttgaccaacgcctgcggcggcatcaaccgggagtttgcgccgggcaccctgatgctcattaccgacttcatcaacatgatgggcacgaaccccctcattggccccaacgatgagcgcttcggcccccgcttcccggacatgaccgaaccttacagtctggaactgcggaaccttgccaagcagaccgccgatgaactgggcattgcctacaaggagggcgtttacatgggctttatgggtccttgctatgaaacgacggctgaaattcgcgcctttgcggggatgggagccgatgccgtgggcatgagcaccgtgccggaaaccatggtctgcaactacatgggcatgaaggtactggccgtcagctgcatcactaacatggccaccggcatccagacggtcaagcatagccacgcccgcgtgctggagatcgcaaatcaggcaggcgataccctgtgccgatggctgggtgcggtgattcagagaatggagtaaaaaagatataccatgaaaatcctttcgtttggttccctcaactacgattatacctatgaggtcgagcactttctcgcgcccaaagagacccttgcagccaagtccatgcagcggggctttggagggaaaggcgcaaaccagtctatcgcctttgcacgagctggattgtcagtataccatgcgggtcgtgtcggcgcagatggacaaccatttgtggattagcgtgtccagttccgaaagcggcagcgtttcaaaggatgtttcccagccacgctgacgcttcctttcccggaagtagtcaacggcttcatggtacagtaccagcttgcaaaaatggtcaaactggcagcgcctcccgtaatcatcaggggtaactttcatctgctcacccccctttccgtggggagtgagcaggatgatcctgtccgttgtcaggggcctatgctggccttggtctgctgaccgcctccttttccatctgattttttgccggaaatgacaatctgcgaaaatcgacaaaaatcgcccggcaggtcgtaaacctaccgggcgacgatttgaagcgttttgttgttttcttacatggtatagttcatactcatagccggaatattcccgtggcggggcaaggcttttttaagcggtagaagtggattagattataatgatagtaaaacagcatggcggcgtcctcccgtgggccgccatgcctttaactgctgggaatgacagaaagaaagcagcggccttgatttctcaaaaccgccaccagtgaatataaattaagcgtgaaaatgggtctgcccagcagcggtttttttcttttctgccgctgggcagatgttttttctttagatacatgataagaggaatttttgaagattccataaagatttgaaaaatggacggacacaaaagacgtccattacactatcggaaaatcagcaaggaagtttcatagtaacctttgcgccgccggtttcttttgaattttctaaaataagctgaccattatgttgttccataatcgaatttgtaatatatagacccataccaaagtgtaactttgaattgcggctttgatcgcccatatagaaccgttcctgtgcgtggcataatgcctctttagaaaaccccgttccctcgtctgtgactgaaatttccacgaaaccgttattactctgaacatccacataaagcgttccgccttgcggggagtagtccagcccattactgataacattcataatagcacgttctatcagcaccctatcaaatttcagcatttgagggagtgaaacagtattcatttgcagccggatttcttttgtccggcatagtgattccatataaccgaacaagtgctgcatgaacgctggcaagtctatactttcaatatggagctgataaccaaccgccgcccgtgatatatcaatcagggtttgaatatatgactgcatctggccggagctttccacgacgtaaccagcgtataatcgttgctcatcatcaagatttgtttctgtgagtaaatcagcatttccttgaataaccgtcagaggcgttttcaaatcatgggcaagcgcggcgatttgctctttctgtgtctgttcggttttccattgccgttctaacgaaattttcagattatctttcatatctgaaaaagatgcaaggacatcttcaaactctttgattttggcgtgtcctacttcaaaatcaaggttttgctttgaaacctccgcagttgcttcaaaaagcggggtcagttgtgtacgcaggttcttagcaaatctggcggtcagtatgataatgaccagcagcgaatttacagccatcaggataaacgcaagcgtgtcaggagatggaaaatattccggtagccatgacactgtaaattgagaaccaatataataccttaaaacgcaaaattcgttttcccggacaacaagtgcaaactgcctccccgtagcatattcaatatattctccctttgcgtacagcagggcaatttctttttcatcatcgtccatattgctgtaaagctcattaaagttcttgtccagaattaagtagccgcatccctgtggaatcacaacctttgtaatatccggggcaatcgtcagcgttggaatgatctcttttacctgcaattcacttagatttgctcttgtagctaatccagcatttacagcaagtccctccaaaccagaagggacaataattgccgctaccagcatgacaatgagggagatagcaaactggcgaaacaatattttcaatgtaggtttctttttcactcccatttatatcctatcccccatacggtgctgatcggacttattttgaaatgctccaatttcgcacgaatattttttatatgcgttgagatcgtagcgttatcgcctattccattaaacccgaaaacggcttcatagatttgttcttttgcaaaaacctgtccccggtttttcgcaaggtattcacagattgaatactcgcttttggtaaggggaaccggctgttctgaaacatacagtacctttgcggaaaggtcaaatcttatatcaggctcaaatgaaagtgtgctgtgatgctcccttttttctctgcgtaaatgtgccgcgacacgggcgcgaagctcctgaatacgaaaaggtttcgtaatataatcatccgcaccgatgcccaatccaaacaatatatcttcctctaatgtctttgcggtcagaaagagaatcgggcagtctaccatattcctgatctgtttgcaaaactcaaacccgtctgtgccaggcatcatcacatccaaaagaatgaggtcatagaaatgcagctttttgatgtctacatcatccgcattttgacaggctgttatcaaatatccatctttccccaaactgttcttaatcaattccaagatagaaacttcatcgtcaactacaagtaagtgggccaaaaaatcacctcccgccccattataccacattgtcgaggttactcatcattatttttaatgtcagctttccgatattcattgttgatatttacagctacggcattgcttatatccacatccacaatactgtaaacgtagccgaaaatgaaatcttcccccgccacatttttgaagcgtttcgatacctgcccgatttcttcttgcagttctgacatttcaagacattcatccgttatggtatatgtcaggccgttatatgaaatttcatcatagtttgcggcgttcagctcataatacggcagagattcatttaacgccttatttttatcggcggtatcgcggagcgcaccgcaggccgataagcatataagacttacaagcacaattaccacggcaaacaggcactttttattcactgtttttacctccctcccaaccatgaaaccaaaccaaactggcaatcagcagacaaacagtgcagcatacagaaataatcataccgctgaaaaaatcgttttttacctgtgcatacagttgggggctatcccatgcaagcacagtgtaatccatagcacgaacgccccaggcccagggaatatatttccatgtagcgtcaccaagccctgttatcataagggcagctattaaactctctgcaattcccaatcccatagatgcaccttttccgaagctcattcccacaaacaaatgaatcaggtaaatgggaagcatggtaatcaacaatagaatccctgctttcaggtaaaggcttgccggagcatccctatatagtgcagcgaatgttcctaacgctaaaaatgttgcgccaaaagcacagatcatcagaaaaccaagtttgccaatatacgttgccgtgcgagatgggattgttcccaacaaaagctgataatgcccggcctgattttcgatctgaacaaccaggcccacaataatgccgatcagaaacgggaacgcaacggccagcacttccagataggcactgattttggttgccagttcccatctggatatatgatagtaacccgcaaaaatcgccgcacatataatcggaatcatgctgtgcatatagagcaaaatgctatgtttacacttctgatattctgctttccagcagcgaaccacagataccatagttaccccacctcctttttctcaaaccatcttgcagttaaaaatgacagcgccgcaaaccaggccagcgaaatgaccaatacaagtataatcatccaaaatgccattgccgtactctgatctgcaaccggctcaccattaggcaaaatacctaacacggaaatcataagatgcggcacccagctatacgggcagatcatccacaaagaggttgtagctgtgaaaatccctaaaacgcttccaagtccggcattaagaataaccgtgacaaagataccaactttttttgataaccataagcacagcggaacttcccataggcttgcaatgacaatacaagctgttccggccgctgcctgccaaattccgattgtcaggggaatttcgttgataactaatattgcaaaaccgcccaacagatttagcgccaggaaaatgaaattccccacacaggagtaaataccggccactccaatttttgctttccagactttgttctgcgaaacaggcaatgaagcaacggcacgatattttagtttgccattatcccgctgttcaatcaaggcacaggtgagcgtaaggaatccaggataaagcaggatataccaccaattataagaattgagctggaaccaaagaggggcaaaaaagttcataagcgcagttacaaacggggccagaacgatcagcgtttttgtgaaagttctcttatgctttaggttctctgcctgaatatatgccatctccatttaatatccctccttaccatttctgcgaacaacatccataaagagttgttccaaatcttcaccggcgcgaagctctccctcatatccaaggacgccgccagcaatgatacccacatgatctgcaatctgctggacttctgacagaatatggctggacaaaataactgtaatccctttgcagggaaaagagcgaattaactctcgaagttcctcaatccctaaagggtcaaggccgttagtcggttcatccagaatcaaaagctggggactgttcagcaatgcaatagcaataccaagccgctgcttcataccaagagaaaactgcccggcccgtttcttgccggtattcgtgagctggacaatttgcaatacctcgttaattcgtgcatcgtccaggccgagcaatgtagttctgactttgagattttcgtatgcagtcagattttcgtaaagcgggggcatctcaatcaaagcaccgatatgctccagatcattccgcttccacgggtggccgtcaaactcgatgcttcccgatgtggggcgcaaaatgccggtgagcatttttaagatcgtggatttgccagccccattcggccccagcagaccataaaccgagttgcgccggatgttcagtgacacattgcttaccgccatttgccccttgaaatttttgcagaggtcagtcgttttcaaaatcatatccatataatcaagtcctttctttgattctacggatagcataccgggcaattttgaagatttcataaagattcccgaaaacagaatagcccgtaggtactgcttgatgttgcggacgcgggttgtgttctcccgcaggccatccagcacaaagcggatatgttcgccgttgagcttcatgtatgatgtgccggaaagcgcactttccgactatctgcggccagactggagcgatgcgtgcatcaatgtccgcaccgaggaagcctacgaaacggcccatgaggtgctgcgggcggaaggactgtttctgggcacatcggcagcagcggctttgcacgcagcggtgcaggtgggccgcagaccggagaatcagggaaagaacatcgtggtcatcgtcccggacaacggcatgaaatatctgtctacgccgatgtaccggcagaaatgataaaaacacgatgatacgactgaattttgaaaagattgcataggattttataaaagtattattcttttatgaattttagcactctacgcttgacagtgctaaaaaatcgtgttataacagtggcgtgctcaggaggaagggcaaaaggagagccgcaaggctccccggaaagccctttgcgaggagcttcaaaatgtaattttatacccgacccgaacgccgggattggaggtatgttttatgtttatgccgactgtttttcatgagaacctgttcgatgatctctttgatccgttctggaacgagggtgcactggagcgtgtgatgaaccgcgaagcccgcgacacctttggtaagcgcggcgcaaacatgatgaagaccgatgtcaagcagacggataacggctacgaagtagacgtcgacctgccgggctgcaaaaaagaggacgttcagatggatctgaacgacggctacctgaccattcaggcagtgcgcagccacagcaacgacgaaaaggataagaagggccgctatctgcggcgcgaatccttctccggcacctgcgcgcgcagtttctatgtgggcgatgtgaagaaggaagacatccacgcaaagttcgaggatggcgtcctgcacatcgagctgcctgctcctcagcagacgaaggctttgcctgagaacccgaatctgattgagatcgagtaaatgccgaccgtgtgcgccaaggcacaacgcacataagatgcccccggagagccgcaacaagctctccgggggcatttttgtttcgctatcttttccgcaagggaaaaccatggtatactgagaacagcaacttagaatttatggaggtacctcactatatcctgtgagccgggagagcggctgacttttgcggtatactccgttcggaaagatcaaagcgcatggagggaataagcatgctgacctatacctatgtttcagagggaacgtttgccctgatggaaaaaccaaagccggtgctgcagcacgagcgggacgccattgtaaaggtgacccttgccagcatctgctccagcgatctgcacatcaagcacggcagcgtgccccgggcggtgcccggcatcacggtagggcacgagatggtgggcatcgtagaagaagtgggcagtgcagtgaccaatgtgaaacccggcgaccgggtgacggtgaacgtggagaccttctgcggagagtgctttttctgcaaaaaaggcttcgtgaacaactgcaccgatcaaaacggcggctgggcgctgggctgccgcatcgacggcgggcaggccgagtatgtccgggtgccctttgcggatcagggactgaacaagatcccggacggcgttaccgatcggcaggcgctgctggtgggcgatgtgctggccaccggcttttgggcggcacgcatctcggaaatcacccccgaggataccgtgctgatcctcggtgcagggccgaccggcatctgcacgctgctgtgcgtcatgctgcacagccccaagcgcatcatcgtctgtgaaaaggacgcaagccgcctgcagttcatccgtcggcactacccgcaggtgctcaccgtgcagccggaggactgcgccgcctttgtgcgtgcccacagcgaccacgacggggccgatgtggtgctggaggtggcaggggcagactccaccttccggctggcatgggagtgtgcacggcccaacgccgttgtgacggtggtggcgctgtacgacaaggcacaaaccctgccgctgccggagatgtacggcaaaaacctcacctttaagaccggcggcgtggacggctgcgattgtgaagaaacgctgcgtctcatcgcagaaggcaagatcgataccgaaccgctcatcacccacacctaccccctgcgccggatcgcagagggctacgagctgtttgaaaagaaacgggacggcgtgatcaaggtggcagtggagtgctgacggtctgcgccaaggcacaacgcacataaagtggccccggagagctgtaacaagccctccggggccatttttgtttcccgacatcttttccgcagcggcaaggcgtggtagaataagggcagaaccaatccacaggtgagaaaatcgaacttcagcctgaaatgcggagccgttgcatcgagcatcgcacatgattcccataacctgattgtggcaggggacaacgataccgatatgatgctggccggcaacactgtgcggaaaaacaaaggcggacttgcgtttgtggcagatggacaggtcgtggcagaacttgcgcttccggtggccggattgatgagaaccgaaagcgcagagagcgttgcggcgaaaatgcaggcgctgaacgatgccctcaaggcacatggtgtagcggaagatatcggcatctttatgaccctcgccttcgtcagccttccggtcattcccaaactcagactgaatacatacggcaccatcgatgtagcgcagcagaaagtcgttccggctgttttttaataggcgataacaaaaatactgccggagatcgacctgaatggtccgtctccggcaacagaacagttcgttcctactcttagaagcgagctacatcaagagaaaaattgacggaaattcttatttgataaatcggaattgtatcagcgtaaggagaacaatatcatgttcagaacaattcgtaaaaagaaaaatgaaatcagcaccgacgcagcaaagactcttttgcagtccagccgacgtggcgttcttgccgtaaatggagatgacggatatccctatgcaattcctatcaactatgtctacgatgacgatgcacagaaaatttattttcatggagcacgtgtaggtcataaagtagatgcactgcgtgcctgtgacaaagtatgcttcacggtatatggaaatgaaaccatcaaagaagaagattgggcaccgtttgtgcagagcgttgtggtattcggcagatgccacctcgtagaatccggtgcaagagcaacaactctgttaaaacgatttgcaatgaaatactatcccagcgaacagttagctgatgaggaaattgcccacgcaggaaaggctgtgcaaatttttgaaatagacgtggagtacctcagtggcaaggaaatacaggaacgataaattcgcgtttgtggagcgaagcagaacaatgaaagccccagtggggcttttaagcggcagaacggtcttgcgtagcaagatggaggggctttgccccgacaagttcacgtttgtggaagttataaaggggtgcatcatggaaatcgagtataaacaaaagatttcacggccgatgaattgcagaaactgtttttatccgttcactgggaatccggcaattatcccgaaaaacttgtccgtgcgatgcacaattccacacgagttatttctgcgtgggatggtgataagctggtcgggctggttcgcgcgcttgatgatggagaaacagtcgcatttttgcattatcttttggtggaccctgcttatcagggacagtacataggagatgagctgatgaaacggatcatgagtttctatcaaaatcttctgtatgtgaaagttatgccgtctgatcctaaaacgatcccattttatgagcgatatggctttcaacaatatgataattactctgcaatggtgcggaagcactttttgtgagttggtatgatggatcgatttgcagctagcaaggaaaccgtaaggagtacagagcatggatgcaaactgtaccagtaaaagaaggaaagtcaagagtatggaaacggtatacattgcaggcgggtgcctttggggcgtccagcatttttttgacacggtgccaggtgtacggacgaccgaagccgggagagccaacggaacaacaaacacgctggacggcccgtatgatggatacgcagagtgcgttaaagtggtctttgatgagaaatgtaccagtgttacagagcttatggagcatctgtttgaaatcatcgacccgtacagcctgaacaaacagggcgttgatgttggaaaaaagtatcgcacggggctttacagcacaaatcccggacatctggaagaagcaagagcctttattgacagccggaaggaccgggataaaatcgttgtggaagtgctgccgctgacgaattacgtccggagtgcagaggagcatcagcatcatctggagcggtacccggaagactgcagctactgtcatatcccggatgaagtcttaaacaaatacaggaatcagtaagcaaaggaaaaacgaaaatgcggggattgggaacgatcatcaatgcgctggccattgtgataggcggtgtgctgggtattctgttcaaacgctttctgaaagagcgctatcaggatacaatcatcaaagccacgggcttttccgtggtgtttctgggagcggcgggaacgctctccaagatactgacggttaggccggacggaactttgagcaccggtggctctatggtcatgattctatcgctggcgttgggtgcgctgctgggtgaacttattgatctggatgcacagtttgaacgctttggcgagtggctcaaacacaagactggcagtgacggcgacaaccagttcgtcaacggcttcgtgtcggcatccctgacggtgagcatcggggccatggccgtcatcggctccattcaggatggcatctacggcgaccattccacgctggtagcaaaagcgattctggactttatcattgtgctcatcatggcgtcctccatgggcaagggctgcgtgttttcatttattccggtggcagtgctgcaaggtgccatgacggctcttgcggtagtgctgtccggctttatgacggacgctgtgctgaacaatctctcgctggtaggaaatattctgattttttgtgtgggcatcaatctggtgtggccaagaaccatcaaggtggcaaacctgctgccgtcccttctggttgcagtggcgctgacggggattttatgaatcggaatttgtagagagggtgtgattatatgaaaaacaatagtccacaaaagcaggctgccatttcttggatcattttgatgataggaatattgctcgcagtaataggagcaatgacggcaaaggagtacagagtaaacatatgcctgctaatcggtgcaatggttgttattggtggtattgtatatcatctcaccatgatgaaatgtccttattgcggttgctcgcttgttggttataggccgatccctaaagaatgtccaaagtgtcataaaaaatttgaagaataagttcgcgtttatcaaggtgaacatttaagtattaaaaacgggagtgaaacaaatgatgaccattgcacagatcatggaaaagatgatcgccttttccgaagggaatatccatgacatcacgcacctgagctgcgtgtggacctatgccaaaaccattggtgagctggaggggctggacgcagacacgcagtttattctggaggtggcggccatcacccacgatatcgcctgcccgctctgccacaaaaagtacggcaacaccaatggtaaatatcaggagcaggagggtgccccgctggtacgggagttcttggcggataccggcatgacagcggcacagaccgaccgggtggcctatctggtagggcaccaccatagtccggcgcagatcgacggcattgactatcagattctgattgaggcagattatatcgtcaatgcgtccgaaagcgggtacgaccagcaggcaatccgaacctttatggaacatacgatgaagacggccgcaggtatccggctgacgaaaacagtgtttggagtgtaaaaatgattcagaagcattgctttgaatgcggtacggcattgattgaaaaagaactggaagaagagggcattgtgccttattgcccgaaatgccagcaataccggttcccgatgtacaatgtggcagtcagcatgattgttgtggacgaggaaaccgggaaaatcctgctcatccagcagtacggcaagccctcttatattctggtggctggatatgtgaaccgcggtgaggcagaagaacacgccgtggtgcgggaagtccgggaagaaaccgggttggaagtagagtacctccggttcaaccgtactaagttttttgagccgtctaacacgctgatgtgcaactttacggctctcgtcagaaccgcaaaggcgctgcatatcaaccacgaagtggaccgatgcaagtggttcaccccgcaggaagccagagaaaatatccgtcccaacagccttgcagcggaatttttgaatgcgtatctggacgaagtggggaataagccgatggagatgtgattcgtggctgtgccacgggaattctgacggaaagtatggaaaaaagttggttcggcctgtttcggttgacttttttataaagaatcggtatattgatactatatagtatcaataagtatcaactgcgaggtggacagaatggatggggcacagtttgccaaaatgctttcagataagcatttgtttgaactcaatcggatggaatacaagtactcgactgtcagcgtcaaagaatttgccgaattgctgcggcaaaactttgcgcagcctctgccgttgactgatttttctggaaataagctgttttacctgccgaacctcgcgcaaatttcaacaaatggtatgaagcagttgctctctgtccctgtcagtggacaaaacttcggtttgtcggcgatgaccgaggaaatttatgctacttttcaaattgaaagtatccgctcgacccgcagcagtatccgttatatcctcgatggttatgcccctcgtgatgaacaagaagcccgcatctatggtatgaagcgcggactggagtttatcgcgaatcgtcagaatacgatcaccgaggagaatctgcattacctatatcagatcagcacaggggattatctcccggatgaagatcgattactgccaaaccacttttatcggcatggcgaggtttttattgtgggcggtgaagaacccagaccgggacttccggcagagcggcttcccggtgccatgaaatgtcttgtcgattttgcgaatgccaatgacggcatcaatgagctgcataaggctgccattctgcactttgcctttgcgtactaccacccctattttgacgggaatggacgcactgcacggctatttcacctctggtatcttgttcagcagggctatcctgcggcgctgttcacgccgttttctcgatacatcgctgaaaacaaggacgcatattacaaagcctacgaacgcgtggagagaaatgctctgatttccggctatacggatgtgactccctttctgttctacttctgcaatgaggtctataaccgcctgcaggtggatgcagtcccgccgaaaactgatcttgaggtatatcaaactgctcttgcggaagggaaaatcacagaaaaagaacggctgctctgggagtatgttctgtctgcttatggtgcagaggagtttaccacaaagcagctggaaaaggacttccgaaacgctgcgtatgcaaccattcggacgtttgtgatgaaattccatgagatgggactgcttactgcaagaaaagcaggaaacagggtgttctatcgtgtcggtgggacttctgacggtcggccattaagagcaaaatgcagcttatccgatttgttgagataattcgctatccgatgaagtattagaagtaaaatagagaaaaagtcctacaaggctcaaattggaccacaagaccgaccgaaaaccttgtagggcttgttttttgagctttttcaaatttatatgtgaaaaaagttgtctaggaattgacatcgtgcagagttcatggccaccatacaagaaagtgaccgcccagtgaaagtgtgttcacagaaagataagaggcatccgactcagaatcgggtgcctcattttgtcatgcaaagttttcctgaatgatctttccccaaggcagcatctggtcgagacgctccgggtgggtcaggatctccatgtcaggcagattctcaaaaaggaactgctataaactacttcattccccttctttttcgctgtttacgatagcctgcaccttggtgggcagaccatagatgctgatgaaaccggtggcatcgctctgcttgtagtcgccgcctgcggcaaaggtggcgatgtcttcacgatacagagagtacggcgaccagacccctgcattgatgaggttgcccttgtacagttccagacgcaccttgccggtgacatgctcctgtgtggaggtgacaaaggcactcagagctttgcgcagcgggctgaaccactggccatcatacaccagttcgccaaaggtgatggccagctcacgcttcttgtgggcggtgagcttgtccagcgtcagagtttccagcacttcgtgggctttgtacaggatggtgccgccgggggtctcatagacgccgcggctcttcatgcccacaagacggttctccactacatcgtacaggccgatgccgttgcggccgccgatctcattcagctttgcgatgatggcagcgggctttagcttctcgccgttcagagccacaggagcgcccttttcaaattccagctccacaaactcggacttgtccggtgcggtcttgggactgacacccaattcgaggaagccggccttatcgtactgaggctcgttgcctgggtcttccagatcaagaccctcgtggctcagatgccacaggttcttgtccttagagtagttggtctcccggctgatcttcagcgggatgtgatgagcctcggcatagtcgatctcttcatcgcggctctggatgtcccactcgcgccacggggtgatgattttcaggtcgggtgcaaagtgcataatagccagctcaaagcgcacctgatcgttgcccttgccggtgctgccgtgacagaccgcatccgcaccctcggcgcgggcaatctccaccacgcgttttgccaaaatggggcgggcaaagctggtgcccagcagataaccctcgtaatctgccccggcctgcatggtgggaatgacgtaatcctccacaaattcatcggtcaggtcttcgatgtacagcttggatgcgccgcttgccttggcgcgctcttccaagccttccagctcacccttctgccccacattgccgcacacggcaatgacttcgcagctgttatagtgctctttcagccacgggatgataatcgatgtgtccagaccgccggaatatgccagcacgacctttttgacctcagacataggaactgcctccgttcaaaccaacttatatacttttcgatttccctcgtgcaatttcatgattgcagtgcccattatacgggcacttggaaaatgtgtaaaaagtgttctgcatatagcagcaatatgaaagcagtatttcacagcggggcattatgaatctataataggtagttggaaataaacagaaagagggtctttttgatggcaacgatatttccaagagaagaaaaggcagaggcactgttcggggagatcctgaaaaatccagaagcctgccaccgcctgatggataccttcaacgactcgctggacatggcagacgtactggatgcgccggccgtgagtgcacagcagtttgccgcggcgctgttcaatgcctacgagaacaaggatctgtctgcctttctgatggcgatctgccagcacagtatgtttgacctgctacggaacgctgctctgatcccgttcaaattcaacgccgatggtcagccgaacccggtgatcctgacggatgatgccggcgttcttttgccgaacaacaaatttgccgtgagcagcaaagtatacgaccggttcatccgggtgttccagaagcaggaaaaggtaaaaatgtaccttgccagcggctactgcaagtatcacggctacgacgaaggctcgatggatgtggtggagtaccactacaaccagcatttggggctgctgctgatctacgaactgccggacaccgtgaagcagaaggtaacggaagcggaggcctactccaccgtctgggatatccagatgaagctgcagcacgcactgccccgttccgtggtctactatggacaggatacgctcaaggacggcggaacccgctacgatgaactgggcgtttttctgccgctggagcactttgctgaccggctggaacgccatgtagaaacggctaccaagatcgtttacggggagtaagctctcctacaaacgaactccctttataagtgcatcacacagcaaaacaaaacgcagcgaaccttctgacggctcgctgcgttttgcattatagaggggagaatggaaggcattgcacctcaggtgcaataacggaatgtcttatcggtgatgatgcgggcaaagatcagacccagcggcagcgccacgatgatgaggatggcgtttgcaaaccatgtggcagaatccgtcagggacaggatgcccagattatagatggcgcggtagaaatacagccccggcaccatgataacaatggacggaaccgtgacagagatgcggggataacctgcggcgctcttcaggcaggatgccagcaggccggccagcaatgcgcccagaaacgccgctacggcaggcgggaaccctgcaaggcttaccagctccagccggaacgtgttcgtcaccgcaccgatgagcgcggcgcagactgccagattccgggggctgttgaacatcagcgaaaagccgaacacaccgccaaagctcgtcagcagccggaacaggatctcttccgggagcgtcaggctcaaagccgggaactgcaccggctgcaaatgcagcagcagtgccatgatccatgccgtcatggtcgccaccagaatgataaggacggcgtaagccagacgctccagcccggagcgcatatccagcttggcaaggtcgatgccgctggtgatgaacggaaagcccggaatgatgaagagcatggagcagatatatcccgcctcgtgctgcgccgatacggcaaacagcacctcggccagcttcagcaggacggcatacacgaggctcgccgaacagaccgaagctgtgatgcccagaaacagagtgaagtggtgctttgtcaacttgcaccgtacaaagttgccgatgcccgcgccacagaaggcacatagcatctcaacgatgccgccgcccagcagaaaggtgaagcagccgcaggccagtgcggctgcaaagcccagcgcaaccggcgaatacaagccgtggatacgctcgatctcgtcgaggtggctgtgcagttcttcgccggtcataaatttgccctcccggtcgaagtcgctgacgaaatgctccagccggttcaagcgggaggtgttcacgcccgtgtttgtcagacagagcgactgggtataacactggtcgccatcaaagcaggtgaactcaatggacaacaggccgatatctgctgtcgttgtgacacccagctcccgcgaaagggtgttcatggagcttcggacgcgccatgcgccggtgccgcattccagcagcatcagcccggtgcggccaatgacggaggctttttccacaagtcccgcctcggtaatggggttgcccttactggcggacgcataatcgtgccagtagacttccatgtgatttttgatgatctcgctttgccgctgtcccataccggaaagcctcctttttgatatgggaatgttgcagtcctttaagactgcggtgctattataagggaaattgcaggatgggtaaaacgtatcttgaatatgccgacaatattcggttggtattgcaagcaagaaaagacattgcgtttttggcggctctgcggcacggttgaaggcatcggtggacagccggtatgcagacatggagccgcatatcggctcggaacagggcgggaaacgccttgtggtagttctgcagaacaacattggaaaccgtcattcgcctacattgatcgttgcaactgttaccacccggacggaaaagaagaaaaaccagcccacccatgtgctggtggattccaacccggcctttgaagaaccgtccatgattcttctggagcagatcttcacgatcgataaatcccgcatcgaacgctttatgggctatgccagcaaggctgaaatgctccgcattgatatggctttgctggtcagtctggctctgaatgttctgagcggaaaccgcagcgaatagcggacaaccagtaacccgtaaaaatgaggtgatagcgatgtaaccggaggtgagtgagccatgcgaaagagtgcccccattgaagtggtggtacattaccccaaaacgaaagagggatgggacgaactcggaaaacgggtcgcaaccgcccacgccaactatgtgatcgaaaaaatcgaccgtctgaactgccccacatggcagaagctcgaattgctgcaggcggtgatcgatactaccaaaggaacttacaaacccaaggaacaccaaaagcccggctggcagccgagccgataaacaaagccccacgctcaacatatgcttttctgctctgaccagagacggtcagattcagaggcagtgttgagcgtggggctttttgtgttacataagtgttttgaaatgcggctgacacaacaaaactgttgattgctggcagccaatatggtatcctatggcattgcataacactcaaaacagttccgcttttttctgaaagagcgtatcgaaaccgtcctgatggagcagcagaaaaagctttttgaaaagtaaaagctcttgcgtcccgtgaaaaaagaaggtaatataaatacagagcaagacacagaacgcagggagggatgaaaaccatgttttacgagatcatgcaccgggaaagctgtgtggcacaactcagcacgacaggggaatgcagggtctgcctcgaggatttcatgccctatgatctggttctggtggaatcggatgattttgacgagcgcatcaataatgtaacgaacttttactattggtgcgcctcccggatgttgacgttggatcgcacctacgccaaggaaatcctgaacagtatcggtgcatctcagagtgttacggacagggaacgagcacagattgcattatcctaccattgtctgtctttgctggatgtgttctgggtgaaagaagaaaacgagaagattcgattcgaggatatcaacctttttgcacactccttaagcaatgcgcttgtggatattgcgctgcgggggcaccaaatgacggtgacaaacgcccatcttctggcaaatgacctgtctacgggcggcttgtaccccaaggcgtgggtgcgaaaagaggatggcttctatctttacaaggatggcggcagggatgcggtggaacgtgaagtgctggcaagcaaaatctgccggtgctttgactgccatcaggtactgtatgagcaggggatgtttgaaaatgagccggtttctatcagcaaaatcatgacatctcagcgatacagtcttgtgacctatgcagcctatgacgtctactgcacgaaccatgattggaacacgctggataagatcttagagttggatgctcccagctactatatgatgaacattctggattatctggtgggcaataccgaccgtcattgggaaaattggggtctgctggtagacaacgaaaccaatcagcccatccgtctgcatgacctgatggacttcaaccgggcgtttcagcagtacgacacgccagaaggcgcaaactgtctgaccgtgggaaaacgccatctgagccaaaaagatgctgcagtggaagcggtgcggaacatcggactgaaccaagtccgtcaggtggagcacaccgtattctccgagcatccggcatggaaagcaacgtttgaagaacgactgcgtgttttacggaacgccatgtaagtcagagcgaatatcagaataattgaaacagaatgattccataacgaaagcccgtctgcgctgccacatatcgtggcttgcagacgggctttttcgtttgaccggagaaaaattgccatacctcacatgcgaagcatagatggaaaatcggaaccaaggttttccaccagatggcaaaagcacttctgactgatggtcttttgtccgctttcccagcagcggatgcttgtccggctgacctttgcatggtcggcaagctgctgacggttccagcctttgacctggcggtattcccggagaaaaactccgccgccccggtgcaggaacagggtgtagtcgtccagaatgtcctccaccgggatgccgtaaagggcggcgagcttgtccgccagctccggcgtaaagctgcggtgaaatgcgccactttccagatggagcgccagaaacagaaattttgtggcgaaaaattgtagcaaggtcagcagcacacgatatccctcccggtacatagttgttagattgtatgagctggggcgcggatagttgccggagagccttttgtgcgcggtatcttttccgcaggaaaaaagcgtggtatactgagggggataactcggaagttgtggaggaaaatcaaatggatatttgggaaagaatgtatgaaaaggcgaaagagcaatatcatccagaggaagtatctccctttatatatgcgcacaatgtagtttgtgcaatagaagctgaaaacggagatatctatacgggattctgcattgaaagctgcagcggagtgatgaatatttgtgccgatagacttgccgcactgaatatgtacgctaacagtggtcagacaaaaataaaaagatttatagcattccgcgacagcgcgccaaacggaggtgggagcggtatgccatgtggtgcttgtcaggaattcttttatcaattaaatgaagcaaacgaagatatggaaatcatggttgattatgaaaaacgagaaactgtaacattaaaagaacttatgccgaattggtggggaaaggaacgttacgctgaggcaaagagtaattgacaatttccattattcgaccaacaaaatcaaaccatcccttcagcggacgatccaaaacggtcggccgctttttttatacccacgcagcagggacgaaccgcccgaaaaactgcccatggcggcgtatggaagagtcaacgggccaacagctcaaaatgattccgtttggtgaccagcagcccttccttttgcagcttggaaagttctgccgacatggcggcacgttccacgcagagaaaatccgccagctgctgacggtcaaaggggatgtcaaaggagagggaggattgccggatggactcggcagacaggtaggacagcagcttttcccgtgtggtccgcttgctgacatgggtgatcttatcgttgaaaagcagtattttgtttgccagaacactgaccagattgcggatgagcttctggtgatggtcgcaggcggtggggcaggcggtgagcagccgcttgacgttgagcagcaggatctcgcaatcctcctctgccaccacgctgatgttcaggatggcaccgggagtggcggcgtaaggctcgccgaaaaaatctccggtgttgcacttggacaggatgttgcggtgtccccaaagatcctcctgaatcacaagggtagagccggacaacatgagccccatgacctctgtggaatctccggcacggaagatataggagccccggggccgggtgatcttcgctgcactgacacagtgcaggatggacagaatctcatcatcggtaagcccggtaaagaaggggcagttccgcagaacaggaagatatttttgcataaaagttctccttgttggaattcaaacatacaagatggctttagtatactataataaggctgcaaatgcaaaaacacccacaacaggagagtatagatatgattcggaagatcatccatattgacgaagaaaaatgcaacggctgcgggctgtgcgcgaccgcctgccatgaaggtgccattgatatcatcgacggcaaggcaaagctggtgcgggagaatttctgcgatggctttggcgactgcctgccgggctgccccaccggtgctatcacctttgaagagcgggaagcccctgcctacgacgagacggcggtgcaggagaacaaaaagaagaaggaattgcaggagaagatgaagcacctccacgagggcggctgccccggctcccggatgcggatgctggaacagccggagaccgccgaaagcgtggcttctgcccctgtgcagtccgtttcccgtctgcgcaactggccggtgcagatcaagctggcacctgtccatgcgccctactttgagggtgcaaagctcctgatcgcggcggactgcacggcatacgcctacgccaatttccatcaggagttcatgcgtggtaaggtgaccctcatcggctgcccgaagttggacgctgtggattacagcgaaaagcttaccgagatcctgcgcaataacgacatccagagtgtgaccatcctccgcatggaggtgccctgctgcggcggcttggagatggcggcaaaaaaggcactgcagaccagcggaaagttcattccgtggcaggtggtcaccatctccattgatggtaaaattctggattaagcaaatagagaggaactcaagatggaacataaaatgttttgttttcagtgcgagcagacagcgtcctgcaccggctgtatcggaaaagcgggagtatgcggcaagaccgccgatgtcgcacagcttcaggatgaactgaccggcgctctggttggactgtccagagccacggacggcggtatgaaggcaacgccagagatgtggcggctgatgatcgagggactttttaccacagtcaccaatgtgaacttcaacgaaaatacgattcgggaattgatcggccgggtacatgccgaaaaggcgcggctggcacccgactgctcaggctgcgctgccccttgcggacgcaccagcgactacgatatgaacctgctctggagcgccgatgaggatatccgaagcctgaaatctcttattctctttggcgtgcgcggcatggcagcttatgcacatcacgccttggtcttggggtataccgatgatgaggtgaaccgcttctttgccaaggcgctcttcgccattggcgaggactggggcatggaggaactgctgcctatcgtgatggaggttggcgagaaaaacctcaagtgcatggcgcttctggataaggccaacaccgaaagctacggaacgcccgtaccggttaccgttccgctgaccgtagaaaagggaccgttcatcgtcatctccggtcatgatctccacgacctgaagctgctgctggagcagactgaggggaaaggcatcaacatctacacccatggcgaaatgctgcccgctcacggctatcctgaactgaaaaagtattcccatctcaagggcaatttcggcacggcatggcaaaatcagcagaaagagtttgcagaacttcctgcgccggtgctgttcaccaccaactgtctgatgccgcccaaagcaagctatgccgaccgggtgttcaccacgtcggtggtatcttaccccgaaatgatgcacatcggagcagacaaggacttcgccccggtgatcgaaaaggctttggagttgggcggttattccgaggataaagccttcaccggcatcaacggcggcagcacggttatgactggctttgcccgcggtacggtgcttggagtggcagatcaggtcatcgaggcggtcaagtctggcgcgatccggcacttctttctggttgccggctgcgacggtgcacgccccggccgcaactactacacggagtttgtaaagcagacgcccgccgataccgtagtgctgacccttgcctgcggcaaataccgcttcaacgaccttgaccttggtaccatcggcggcctgccccgcctgatggatgtcggacagtgcaacgatgcttacagcgccatccagatcgctattgcccttgcggatgctttcggctgcggtgtgaatgacctgccactgtccatggtgctctcatggtacgagcagaaggcagtgtgcatcctgctgacgctgctgtatctgggcattaagaatatccgccttggccccacgctgccggcattcatttcgccgaacatccttaacttcctggtggaaaactatggcatcgcgccgattacaacgccggaagaagatttgaaagcattgttgaaatgataatgatgaccattgcacagatcatggaaaagatgatcgccttttccgaggggaacattcacgatatcacgcacctgagctgcgtgtggacttatgccaagaccatcggtgaactggaagggctggacgcagagacccagtttattctggaagtggcggcgatcacccacgacattgcctgtccgctctgccgcaagaaatacggcaacaccaacggcagctatcaggagcaggagggtgacccgctggtgcgggcgtttctgacagataccggcatgacgactgcacaaattgatagggtggcttatctggtggggcatcaccacagcccggcgcagatcgacggcatcgactaccagattttgatcgaagcggattatatcgtcaatgcatccgaaagcgggtacagccagcagacgattcaatcctttatggagcataccatgaaaacgatggcaggcatccgactgacgaaaacgatgtttggcgtataaaggaaaagcttgccgcaaaacacaaaaaaatagattccatagcgagtgatctgaaaaggtcgctcgctttttctttaccatgaacttgaagggaggaacgctatgccaagcaaaaccgaagaatatcttgcccttgcccagcgcacggcgaatggcttgacccggtactgggaaagctggacggactatctgaccaccgcatcccggctatacaagtatccctttgcagaccagctgatgatctacgcccagcgcccggatgccgccgcctgcgccgacttcgacatctggaacaaccgagtgaaccgttatgtgcatcgaggtgccaagggcatcgccctgctggatgaatccagcggattcccgcgcctgcactacgttttcgatgtgtcggacaccgtggtgcgccgcaattcccgtgaccccgacctgtggcagtacaaggaatactcttacttgtcaatctgctgtaaaaaatcacctgagtttgggtaaaattgacaaagtgaaaaagaaagccgcttctatcttgacactccacaaagaatatggtattgtagtcaagcataaaataagttattcttcaagtgcttaatttgtttgtgccttacaaaaaagaaaattgtacgtgagcagcgtcgttggattgttaccgtttggcgggctagaccaactctgcatagcacaagccgaaagcgtgtttcagccttcggtatgtttgctgtgtcgagagtggtctttttttattgcctttttcaacctgaggaggagaaacaatgcaatataccgtcaaaaaaccgatcaacaacaacattctgcgcgtggtggaccccacgggctgtgagctgatcgtcaccgggcgcggtctgggctttggcgttaagcctggctataaaatcgaggctgaaaccgtggagcgcagctaccgcatgaccagccctgccgtgcagcagaagttggtggaacttctggaacagatcccgtatgagcatctgctgctcaccgacgagctggtggcaatgatccgcagccgggtgaactacccgctgaacgaaagcctgctcatcacgctggcagaccacatcagctttgccattcagcgcagcgaacagggaattcgcttttccaacccgctgatggctcccattcgggaattctacccggaagagtatcgccttggcatggagtgccttgccgccatccgccagcgctgccatgcagacctttcggacgacgagggcggcttcattgcgctgcacatcgtcaacgcagagctcaacaccaccatgagcgtggtgaacgatgtcactcgctttgtggatggctgcgtgcaggtagtggaatacttttacaactgccattttgaccgggatgcactggatttcagccgctttacagtgcatttgcgcttttttgcgcagcgcgtatttcaaggaaaacaggagcaggaaaacgatacccacgacgaagtgttccgcgccctgatcgcccgcaattgcagcgaacactacaaatgcgcctgctgcattgcggagtatgtgcgcaacacctggcacaaggagctttcggacgaggaactggtgttccttacgatccatctgaaacggattcggatggggaaataagctttcttgcttcacctttgattctccacaggtttttcctgtgtggatatatatgctggatacgaacttgagaaaaggagaactgaagatgaaagacaagatctttggcgtgctgcagcgcgtgggacgcagctttatgctgcccattgcactgctgcctgtagcgggcctgctgctgggtatcggcagctcgttcaccaacgaaaccatgctggcggcctatggcctgaacagcgtcatccaccccggtaccctgatctacaccattctggacgtgatgagccagaccggcagcgccgtgttcaacaatctggccctgctgttcgccatgggcgtggccatcggcatggcccgcaaggaaaaagaggtggctgccctgtccggcgcagtggcctatatcattatgaacacggccattcaggccatgatcaacgctgcaggcggcgtggacgcaatgcctgccaactccaccaccaccatgctgggcattaccaccctgcagatgggtgtgttcggcggcatcgtggtcggtctgggcgtggcggcgctgcacaacaagttctataagatcgagctgccgcaggtgctggccttctttggcggcacacgctttgtgcccatcatcagctccatcgtgtatctggtggtcggcattgccatgttctatatctggccggtggtgcagagcggtattgccgcgctgggtgcactggtgctggcttccggctacgcaggcacctttatttacggcctgctggagcgtgcgctgattccctttggactgcatcatgtgttctatatgccgttctggcagaccgctgtgggcggcaccgccatcatcgatggcgtcactgtgaccggcgcgcagaacatcttctttgccgagctggcttccaagtccaccactgtgttctcggtcagcgctacccgtttcatggccggtaaattcccctttatgatgtttggtctgcccggcgcggcgctggctatgtaccagtgcgccaagccggaaaagaaaaaggttgcaggcggcctgctgctttccgcagccctgaccgccttcctcaccggtatcaccgagccgctggagtttacctttatctttgtggcactgcccatgtacgcggtgcactgcgtgctggccggtctgtccttcatgctgatgcacattctgaatgtgggcgtgggcatgaccttctccggcggtctcatcgacctggtgctgttcggtgtgatgcagggcaacgccaagacccactgggtgtgggtggtcgtggtcggtgcagtgtactttgtactgtactacatcattttccgctttatgatctccaagtttgactacaagaccccgggccgcgatgatgccgaggaagtcaagctgtacacccgtgcggacgtgaacgcccgcagcgccgcttccggcagcaccgcccccgcaggggatgatccggtcagcgccctgatcgtagaaggtctgggcggtgccgctaatctgtccgacgtggactgctgcgccacccgcctgcgctgcaccgtcaaggatgcggcattggtcaaacaggatgtgctcaaagcctccggtgcctccggcgtgatctgcaagggcaatggtgtgcaggtggtgtacggccccaaggtggccgtcatcaaggcaaagctggaagattatctggaaaatgcacctaagaccccggcggcgaccgcaacacccgccccggcggctcccgcagcaaaggataccgtgctgtctgcctgcctgaacggcactgttgtgccgctggccgatgtaaaggatgaagcctttgccagcggtgcactgggggatggcattgccattgagcccaccgacggtgaactggtggcacctgctgacggtgagatctcctccacctttgagacccaccatgccgtgggcatgaccacggctgacggtgccgaactgctgatgcacatcggcatcgatacggtcaagctgggtggcaagcattttacctacctcgtcaacgagggtgacagggtgaagaaaggccagccgttgatccgctttgatctggaagccattaaggccgaaggatatcccgtgaccacgccgctcattgtctgcaataccgatgactatgccgctgtcgcggctaaagccagtggcaccgtaaagcagggcgatgcgctgctggaactgaagcactaagcgtttctcccaaactggaaggcagggttgttataaagggggctgttgcaaaatagccccaacgaaaaaatgagataggtttccccaaaaggggttgtctatctcatttttttgttgtaaactgaaactgcaatgaaccgactacagaatgaacagtatactcgacgtcctttagtttatatagtagcggtcctgtttttcgagccaatcttcacacagccgctgggcttcgtcctttgtgcagcaggtgcagttgaaaagtttgccacggatggaacagtaagtgtagtgtaccttcgggactccattggcatctcgaaaattagcgcaacgttcctcaccgggcagcagatagatcgtatccacgttcagcagctccttttaccttcgttcatgtgctaagggcacaaccgcagctatcgggttgaaaataaggctgaagccccaattgctccagccaatgtcagagtttcttatcgcaagtcaagaaattagcgcaacattcaacagcatatttgcgatatgcaattcaacgttgttgctgttgcattaaaaagttgaattgctataattgtctatcaaaaatacgttggtacgttttacactgtgacgattcaaaaaacagaggagagatattttactatgatctacaaaaagcgatacggtcaaccgtttgataccgaaagtgtagtgggttcttttttgcctatgatggaaacgataccctatctgaccaaggagccggatggtttctcctatgccatggagccgcaggatgttctgtatggtcttggcgaaaacgtccgcggtatcaacaagcgcgggtgggtgtacgaaagcaaatgctccgatgacggcaaccataccgagggcaaatcctcgctgtacggtgcttataattttatgatcgtgtccggcaaggatacatttggcttttttatcgactacccgggcaaggtcacctttgactgcggctacaccgacatggataccttacgcatcacggtggccgaggaaaattacgatctctacatcattgagggcgaaagcctgaccgatattgtgcaccagttccgccagttggtggggcgcagttatattccgcccaaatgggcttttggcaacgcccagagccgttggagctacatgaacgaggacgaggtccgcgaggtggtggcaaattaccgtgccaataatatgccgctggacgccgtggttctggacattgattacatggagcgttacaaggactttacggtggatgcgcagcgcttcccgcattttgcagactttgccgccgagatgaaagcgcagggcatccgtcttgtccccatcatcgatgcagcagtcaaggtcgaagagggatatgatgtgtacgaggaaggcgtgaaaaacggctacttctgcacgaatcaggatggcaccccctttgtagccggtgtgtggccgggacgggtacacttccccgatatgctcaacccggaagcccgtgcttggtttggcagtcaatataaagttctgctggatcaggggatcgagggcttctggaatgatatgaacgagcctgctatcttctacgcagaggaaagactgaaaaagacctttgctaaaattggggaatacagcaagcaaaacctggatatttccagctttgctgattttaccggcatggtggcagagctttccaacaacgaagacgattataagacgttctaccacaacaccaaacaggggcgtatgcggcacgacaaggtacataatctttttggttataacatgacccgtgctgcaggcgaggcttttgagcggctggagccggacaagcgcattttgatatactcccgttctgcctgcatcgggatgcaccggtatggcggcatctggaccggtgacaaccattcttggtggagccacattctgcttgcgctgcacatgatgccctccctgaatatgtgcggcttcctgtacgaaggccccgacattggcggctttggcagcaataccacggaggatctggtgctgcgctggtacggcatgggcatcttctctccgctgctgcggaaccactctgccaaggacacccgccggcaggagccctaccgctttaaaaacaaggccgcctttgccggtattttacagctgcgctacctgctgctgccctacatttacagcgagtacatgaaggctgctttgcacgacgagatgtactgtatgccgttggcgttcgccttcccggaggatgactttgcccgccgggtagaggatgaggtgatgatcggtgaaagcctgttgatcgccccggtatatgagcaaaacgcccgggggcgttatgtttacctgccggaggagatgctgcaggtgcgggtaaagtgcagcgaaagcaaccgcatcgaaaccagcgtgctgccggcaggccatcattacattccggtggagctggatgaagtggtgttctttatgcgcaagggacaccttctgccccttgccaagaacggcaaaaagatccagagcgttgccgatgtggattttgcagatctgcgcctgcttgcctatgctcccgatggtgcatcctatgaatactataccgatgacggcgagacaaaggattatgataagccggaacattttgtgcatatcacgctggatgcggatggaaacgcaaagagcgatcgtgctacggtcaaagtagaaggataatcgtcagtcattacgcagttcctacagagtgacagcgtttcagcttgaaatgctgccactcttttttgttgtctatgtcacagatgaaatagccactctatctgggaatccgggaagaatgagatggcaagaaaaactgaaagagaggtttatgggacagctctttcagtaaaatgacctcagaagaagcaaaacacacttcggacggaggaaaacacaatggcaaacggtgattacggctatttcggcaaaggtgacacgggctatgcccaatacatgacggctttcaaccgcaactttggcggctcgtccggcggtggcggcggcggaaaccacaacaatggtggcggcggtgacggagacggcagcggctgcggctgccttatcgccattgcggtggtggtcgtgctggtgcttattgccatgggaagctgagggcatccccacggcacaaggctgtcttgcgtgacccggtcacagaaaatctaactaggaaatgttatcatatagtcacagaaaacactaacaatgttccgatggaggaattgaatatgaaagcaaagttttatatctgtgagcactgtggcaacctggtcaccaccatccacaacgcaggcgttccgctggtctgctgcggcgaaaagatgaaggagctgctccccaacacggtggaagccagcggcgaaaagcacctgccggtggcagagctttccggcagcaccctcacggttacggtgggtgcagtggagcaccccatggtggatgtgcaccacatccagtggctctttgtggagacggaaaacggcggacagctccgctacctcgcccccgggaaggcacccaaggcggtgtttgagctgggcagcgaaaagccggtggcggtctacgcctactgcaatctgcatggtctgtggatgacgaaactttaaaaaataaacgggctcctgccagtggttaaacgcttgcaggagcccgttttgcgtgcagacgcttttctgtggaaaggaagcatgacaccgttatcatgaagaaaaatctcacagagcttgtttttatccttgaccgcagcggcaagctctcgtcaaaactccgggtgccattcatcccggatgccaatgtcggcgcagacgatttttccacacaggggcgaagaaatttctgccagatgcagcggtttatagctgtcaaaggttacggtcaggtctgcatgagcagcaccttcggcaacctcgccggtatccgtattgatgccgctgggcaggtctacggccagcacaaagacaccgccattgtgcagacggcgtatcagcccgcaggcagcaagaccggaaggccgcagttcaccatggaacccggtgccgtagagggcatccacagcagcatcaaagcacgggggttccagtacggaaccgtcggcgcagatgtgcaccggcagggagtgcagacgctcaaaattgcggatggcgtcagcagttttcggctcgctctcagccaaaagaacggttacgttccagccatcttttgccgcagcgcgggcgattacgaacccatcgccgccgttgttgccctttccgcagaccaccagcagcctgccgggatgcgggaacttcttttgcagttcagcgtaagccgccattccggcattttccatcatttgcaggtaggacagaccgtgggcatccccggctcgttcaatttccttcatctgcgcagccgtcacaatgcgatgtttcatgttggcaccttctctctatctctattataatggatgagaatgtttggaacaagatgaaagataccggtgcatagaatctgtccccggagagtggcaataagccctccggggatatttttggttttgggaatcttttccgcaagggaaaatcatggtatactgaacgcaacgaatccaaagtaataaaccgggaggtatcgttatgaagtggggaattttagcgaccggcaccattgccaaaaagtttgcgtctacggtggaacagatgggcgcagaaggagagcagcttgttgccgtgggctcacggcacatggaaagcgcacaggcgtttgcacagcagtacggcattccccgctgctatgactcctacgaagcccttgccgccgacccggaggtggaggccatctatatcgccacccccaacaccctgcattacgaaaactgcaagctctgcctggagcagggcaagcacgttttgtgcgaaaagccctttaccatcagcccggaacaggcgcagcagctgtaccgtttggcagaggaaaagcacctttttctcatggaggcattctggatctggctgctgccgctgtacgaccgcctgcgccagatccttgcggctggcaccatcggggagctgaagcagatcacctgtcagtacggctttgttgcctccggtgcccggaaggaccgcaagtttgattccggtctgggcggcggtgcgctgctggatatcggcatctacaatctgggctttctgcgtatccttaccggacaggacccggagaaggtggaaaccaaagaggtgcacatcaacgagtacggcaccgacgattacagccgccttgtgctgacctaccccggcggctgcatggcagagtctgtccagaccatcgggcaggagctggagcgcaatgcccgtattgttggtaccaagggcagtattttcctgccggatttccagcacgccgagaccatgacgctggaagtgaagggcaaagagccggaggtcatccgctgcccggtggacatcaacggctttgagtacgagatccgggaagcaagccgctgcgtagagctagggcgtaccggcagcgaccgctacaccccgcaggacagccttgccctgacccgcctgatgtacgacacccgcatgagctggggcatgaagtttgcaggtgaggtgtaagcacgcaccttgccgcgggtcttttgcgtgcaaaaaccatgggacactaagaacgacaacttggaatttggcgaaggagtgtgaatggatgaaaaagaaaataattctatcaatagcgtttctgatcagtttattaccaatgttatttaaccaatatggcggattaaaaggtgtacaggaaattaccggcttgataaatctactcaatcctattggaatagtgtctgtcattttgtttgttttaggagtatggtttcccgtcaagaaacgagttgttagtaaaagtttaggcgcattaggcgtgattgggattgtggtctccgaaatatataaattcctcacctggcatacattgactgtcaccggtgaagtcagtttacagaatagcattcgattagcattccccgagttttatataggattgaccatttctttggtaatggtgattgcttattttgtgattgacaagtaaacttggcataaggacaacttccagtttgccgggcagacaggcaactgaaaaccacacaaaaaacgaaggagcagccatggtactttattttacgggaaccggcaacagccggtatctggcgcggcgcattgccgaagggttggaaatgccgctttacgacctgaacgcctgcatcaaggcaggggataccgccccggtgcagaccgggcgggacgtggtgctggtgacgcctacctacgcatggcgcatcccccgggtggtgtcggagtggctgggcaagaccacgctgaccggggcagagcgtatctggtttgtgatggactgcggcagcgagatcggcaatgcggcaggctataaccggcagcttgcggcgcaaaagcacttgcagtacatgggcacagcccagatcatcatgccggaaaactacattgccatgtttaatgcaccccagaaggagcaggcacggagcatcgtggaacaggcagagcccgggcttcagaaggtgctgacccggctcagagccggacaggaatttcctccgccgagagaaaacctctacgaccgctttatgagcggcccggtgaacccggtgttctatcgcttctttgtaaaagcggacgccttccgggcaacggatgcctgcatcggctgcggtaagtgcgtggagctgtgccctctgaacaacatccatctggaaaacagcaaaccggtctggggcaaaaactgcacccactgcatggcgtgcatctgctattgcccgaaagaagccatcgagtacggcagaaagagcaaagggaagccccggtatcactttgaagcactggaaaagaagcaggacgtatgaaattaagggggccccggcagtgggcaaccggttgacgaaatggcagatttgtctttgaaagaataaacctattgacatggtgcgaaaatgggtttatactatccccaacacaaggaagggagcacaggcagatgaaacgtacaacagatgcccggcacagactgcccgggcgaatgcgctgctcccagacaaatttccggcagacagactgagaaaaaacaggaagatgccgttgtctgggagaagtgcccgaacatacatcgtcacaataaaaggagaaccgacaatggctgattataaactgtggaatgcactgaaagacgctaagaaatatcgctgggtggaactttctcactcgctgaacaacgaaagcccctactggtccggtatcccggaaggctctgtggagctggcaaagaccgtgtgggactggggcaagccggaactggaatgcctgatccagaccttcaaattccccggacagtttggtacccatattgacttcccgggtcacttcatcaagggcaaagcactgtccgaaaagtacgatgtgaatgacctgattttcccgctggtggtcattgatatctctgagcaggccaagaaagacccccgctacgctgtgacggtggaggacatcaaggcctatgaagcaaagtacggccccatcccggatggtgcgctggtggctctgcgcagcgactggtacaagaagtggccggatatggatgcgctgtccggcatcgatgcagagggcaaagaaaatgcccccggctggtcactggaagcattggagtatatctacaaggtgcgcaacgccgccgccaacggccacgaaacgctggataccgattcctctgcggtggcggaggaaaagggcgaccttgcctgcgagcgctatgttctggacaacgacaagctgcaggtggaagtgcttgcaaatctggataaagtacagcctgccggcgcggtggtcattgtttcttatccccgcattgaaggtgcaaccggcctgcctgcacgggtctgggccattaccgaataagagcggagaagtgggaaaatgtcctttgaaaaagcaaaagcagatctggaagaaaaaggtctgggagaccatgtcattgtgctgaacgagtcctcggccaccgtggccgaagcagcctacgcactgggcgtggagcctgccagcatcgcaaaaacgctgtcggttttgcagggcgaaaagccggtgctcagcgtcaccgagggcacggcaaagctggacaaccacaagtacaagagcctgttccacatgaaggctaaaatgatcccctacgatgaggtggagacctatgtgggtcatgcgcccggcggcgtgtgcccctttggggtgaacgagggcgtggcggtctatctggacgagagcctgcgcaagttcgataccgtctacccggcggcgggcaacggacacaccgccgtcaagctgaccttgcaggagctggaagccgccgccggagccgagggctgggtggatgtctgcaaggagccggaaggcgagtaaggtaacacaagataaacgcaaagggagttctgcccggaccttcgtccgtgacagaactccctttttgccggagccatgctgtatgtggtggtggaagagctgatcccggaaatgtcgcagggacagaactccaacgttggtacggtgtttttacggtgggcttcagcgtgatgatggtgctggatgtggcactggggtgatggttgaggaattccgaaagcgaaatctacttcaaaatctccgaaaatgccgaaacttcttgacagagacagcagcagggcgtattattttggcagagagaccgctgaaaagcggctttttatagaatcgaaagttagcactatctaacttgcgacacaagaattgccggtctgtcacccggagcagtgggagcatctggtaaaaagcattgcattgtgaatggtaaacagaaagagggtagggctatgtccttttttgaaaacacccgcaagcccgtagggcttggtgggaagatcatggttgctatgatgaactttgggcacagcgcaatggcagcgtggggattgcattttttgcagcctgccccggatgctatggtgctggactgcggctgcggcggcggggcgaacattaagacactgttgaaactttgccccaacggcaaggtgcagggcatcgactattcggcagtcagtgtagaaaaagcgcgaaaagtcaatgccagtgccattgcggcagggcggtgtgctgtgcagcaggcaagtgtggcagagttaccgtttgaagcagagcggtttgatgtggtgaccgcctttgaaacggtctatttctggccggaacttgcgcaaaatttcaaagaggtctatcgggtgctgaagcccggcggaacctttttcatctgtaacgaagcaaacggcgaaacaacaaaagacgacaaatggacgcaaatcattaacggtatgaccatctatacggatgctgatctgaaagtgtatctggaacaagcaggattttatcagatccagagccacaaaaacaaaaagggctggctgtgcgtcacagcacagaaatgaggtgcgatcatgaatgtgagtaaagagaagaaagcaatcgtcgcgggtatggtcggttgcttgctctatgtgatcggcgactttttgttttcggcgaccgggaaaagccaaagcacagaatccattgggctgatggtcaaggtagcctatctcgatatggcgacatggcgcatggtgctcagcatcatctgcggcgtgctgggaacagcactttattacatcggctttcaccagatgtggaaactcctgaagcggcatctctcccaaccgaaacagcggaagtgggtcaagatgtttcaggctgcatatctcaccggtacggtctgctggggttatgtccacgccatgtttatgaatgtggcactgatctttaagtttacctttgtgcaatacgacgatatgcgggcggcggctgaaattgccaacaaggtgttttactgcaatgccgcgccgctgctggcatcgtatattctctgcgatgtgctgctttccatcgtgatgctcgtgctgatctggaagcgaatgctcccattgaaaagcacaggacagcggatactggcgtccctctgcaatcctatcgcctttgccgggatcgtgggcaatctgttcacgcttctgccgtggccgcttaatcagatcgaccacggaacggaatccaccgggcacctgctggttctggcgcttggactggttctcctgcgagaaatgacaaaaagcggagagttaaaagaggtggaggtcagacgatgaaggagacttatctttcccgtgacttccgggagactgcggcacagcgctttcccacgcaggcaaagcagctgaacgccgcttttgatgcacgcctgagtgcgttgctggctgaaaatgcgggtgcaagcaaggaaaagcaataccacctcaagcggcagatcttgccgggcattgcagcctacgagaccttgcagcgggtcatgccgaaagaagaagcactgcaaaccgttcacggctatgtggagcggctggcgagaacgagccacaaacagcttgccgccctgctgcacataccggggctttaccgccttgttcccggtgtttttgtcaaatccacccggagcgttttcggcccggcggcgggctttgacccaaaagagctgcagaccggcaacggcatctggcgtgtggatatgatgaagtgtccctatcacgacacctgtgcagaatacggctgcccggagctgtgccgctgtttttgtgacagtgatgacatcagctataccgggctgcatccgaaactgatctgggagagaaccatgacgctggggcgcggcaatgatcgctgtgatttttgcatgaaggttcgataatagcggggagacatattggcatggagcactttctggcagacggcgagacagtggcagatgcgcagcagaatcaggaaagtgaaatacaatgaaagttacaacattagacgagaaatccatccgtgatatcggccatgccttcggctattatgactatggagaggaaacaggaatgtccgctgccttttccgggaaagaagccacggcaaactatatctgcgcttatgtgcgcggggtgctgcggggcggctttctgcacaccaccagcgagcggggcgagggctatatcgcctacaagctgccgaaggagaagatggggctcaagaccatgtggcccattgcctgcggaatgctgcacaactctactctgaagcgccttctacggtttggaatcgccatcaagcggggcggcgcttccctgcaagaccgcatggacaaggaaaagaagccttatattttcgttggccttgtctgtgtgcgggagaaatatcaggggcagggttatatgcgcaaggtgctgaactttgcatttgccgagggcgaccggctgggcgtgccggtgattctggaaacggatgccaaaagcaagtgcgacaaatatgtgcatctgggtatggaacttgccggaacgcatgatcttggcacatatggcaagctgtatgacctgattaagtacccggagccgaccaaagcaaacgggacagtgtgaggaaaggacggcggcgcaataaagaaaaaacaaaactgttcatccgctggtgcatacggtaaaaccaaagggagttctgcccggaccttcgtccgtgacagaactcccttttttacttcataaatctcagtgcgaaggtctgccgggcagcaggaaaaagacgttcatagcgctgcctgctgccacgctcagcggagcaaaaaccacacgcccagcaggatcgcaaggaaaatcagattggacagggtgaacagcccgaaatactgtttcttcccctgtggcagctcccgtgcgatctgccggtaggaaataagactggccatggatgcaatcagagtgccaagacctcccagattggtgccgataatgagagcttgtgtctctgccgtgaacccagacagcagcagggcagcgggaacattgctggtgacctgcgaagcaagaaccgctaccagaacttcccgaccggtcaaaaactcctgcagccagccggagaaagcgggaatgcggccaagattgccaatgaagatgaaaaaagctacaaaggtcagaagcagggaatagtccaccgtccgcaaggtgcgtgggtctgcaaaaagggcgcagacgagcacagcggcaaaggcaatgccatagggcagcacccggatcacggacagcaggcaaacggcaaacaacaccagatacagcaagatgattttctgatctccctgagatgcagaggaagaaacaagctcgtccacggagagggcggcagaggttttccggcagaccattgctgcccaagccagcagcaggagcagagagaccagggtgtagggcagcataagaagcacaaagcctccgatgctcatgccgctttttccgtaaagatagaggttctgcgggttgccgatgggagtcagcatactgccaaggtttgccgcaacggtctgcatacagaccaccgggatcagaagagcgcggcagacatctgctcccagacggttcaagaccacgaatgtaaagggaacgaaggtcagcagggaaacatcgttggtgatgaacatacttccgaaaaagcacagcccgaccagtaccatcgtcagctgaaaggtgctgtgagtgcgggacagcaatgtgcgtcccagcccatcaaaaaagccttgccgccgcagcccggccatgaccgtcatcagggaaaacaggatcgccagtgtgcgcaggtcgatgtagccgatatactgcacatccggcggaacaaagaaggcggagacaacggccagaacagcggctgcggtgaggaccgtttcctgctggagaaattgtttgagtttcatagagacacatccttatagttgcaaaggcagtcctgatgcggtgccggacggcctttttggtatttcagaacagcagcttttgcaattcatttttgcagcaccatcctactccattagcggggcatcgtcaagagaaaacagaaaaaacgcgattcgagcaagaaaaaacggatggctccgcagaaccatccgctaaaactggtatacttagtctttccgatacttatacgcaccctcaatggcgtcaatttccgtgggaatacagaagtttacgtcctgatatatggaagagtagccttttaagcaaggattccggtggactgcaaaaacagcaccagcatcatcaccggggcaacatagcggatcatcacccggtagagcttcttgcggcggaaggtctcgccgccccgctgcatctcgtcaatgacgtaatccggcgtcatgacccagccaatcaggatggtggacagcagggcaatgaaaggcatcataacactgttgctgacgtagtccatgatatccagcagctgagccgcagagccgttgggcagctgtacctcaaaatagaagatgctgtaacccagcgcaatgatggcggaagcggccagataaatgaccgtcagcacaagcaccgtctttttgcggcccgagtggaagatctccatgcagttggcggtgatggattccagcaccgagatgcaggaggtcagggtggcaaaaatagcggtgacgaagaacaggatgcccacgaaagtaccggccttgcccatagcggcaaacaccttgggcagagagacgaacatcaggctggggcctgcgctcatgccctcggtaccggagaacacatatacggcaggaatgatcatggcaccggccagcagagccacgccggtatcaaaaatctcgatctgattcaccgctttgttcagatctacgtccggtttgacgtaggaaccgtaggtgatcataatgcccatggacacgctgagggagaagaacagctggctcatggcgtccagcaagatctgcaaaaagcggctgacggtcagcccttccatatgcggggtcaggtagtagcgcagaccttccagaccggtgcgcatctgcccggaggcgtcctcgtggcgcagggtgagggcgtagcccgcgatcacgaccaccagcaccagcaaaatgggcatcatgtagcgggacacccgctcaatgccgccctccacgccgttgtacacgatgaaagctgttacgcccatgaacagcagagcgaacaccaccggcgacaccggcgaggtgataaagctggtgaaatagccgtcctcggcagcggcggcagactgcccggtgaggtagaccaccgcatatttcgtgatccacccgccgatgaccgcgtagtaggtcataatcagaaccggcaccagaaaggtgaggatgccgagaaatttccacttgggacgcatggtctcgtaggcgcggatggcactctgcttggtgcggcgtccgatggcgatatccgaggtgagcagggtgaagccaaaggtcagcaccagcaccagatacaccagcaaaaacaaaccgccgccatcctttgcggcaaggtacggaaaccgccacaggttgccgacacccaccgcacttccggcggcagcaaggacaaatccgatttgtccggagaaactgcttgctttcttttccatgattctcaaactcctatcctaactgcaatccagcattttgattcgttggcaacaacggctggattgcgtgtcgcaaagatgctgcttggagcaggcatcttgtttatcttgcgacgaactattgtaatataggataacatgaagtatcatatcagtaaacacaataaaattactacgacctataaattttacttatggagtgtttgcgatgcgggaacagaaagaccgatacgagatatttttgaaggtatgcgaaacgggcagtttttccaaagcagcggaggcactgaactatacccaatccggcatcagccagatgatggcggggctggaagaagaactgggggtgcagctgttcgcccgcatcaaccggggcgtgaccctgaccgataacggaacacgtcttttgccctacatccgggaactggcaaaccagaagacccggctgcggcaggcggcgttcaacatcaaccacaaggtggagggcaaactgcgggtgggcagcttttccagcatcacaacgctctggatgccggaagtcgtgcactatttcaaggagcattacccgaaggtgaagattgaaattctggacggcaactatgatgagatccgggaatggatcatccgtggacaggtggactgcggttttctctcgtccattgtggcagacgacctgaaattctacccgctccgggatgacccgttgtgtgccgtgttcccggaggggcatccgctggctgcacagcccagtgtgaccctgccgcagctgtttcaggctccgctcatcatcgaaacccccggctgcgacaacgatatccagcacctgatgctcaagtgcccggtgaagccgaatattgcatacagcttccgggacgataccctcatcatggccttcgtgcgcagcgggctgggcgtgaccatctcgcaggagctggtgatgcaggcattcggctgccccggtgtggtgtcccgcccgctggagcctgcctgctgccggacgctggggctggcgttttccaagacggcaagctcggtggtgagccggacactgctggaatatctgagatccacccggcagcgaaaggatacaccgcagataaaataagaacgaaaagcgtgatatactgagtgggaaaactaggaattgcgggagagaacacgatatgaatttaaaatacaagagagcaacgcttgaagatatcgatatattgacagaaacgagaatagaggtgttaagagcggctaataaactttctgctgatacggatatgagcgaagttgaaagacgatcctataattattatcaaaaagcgctttgtgacggctctcatattgcatatttggtttttgacggaaatcgttttgtaggggctggtggtgttagtttttttcaagtaatgccgacttaccacaatccaaatggaaacaaggcttatatcatgaatatgtatactgatcctgaatatcgaagactgggaattgcttataaaacattagatatgctgattagagatactaaaagcaagggtattacagctatttcattagaagcaactgagatgggacgaccattgtatgaaaagtatggatttgtaaaaatgaatgatgaaatggaattgccagagtgataacttcgcgtttgtagagcggagcggaacatgaatgccccagtggaaggcaattactctgcgttctccggtttctgttccgcaggctttatggtcttgacccgcagggtgaagtacagcaaatgacagacccacaccacggcaatgcagaccctgccgatgggcgcatttttcatgcaaagaaagccgatggccataacagcggtgaccattgcgatgatcttgcattttgttccggcggtcatggcttttttctgaacgaagctgtccagatgttttttatataagttcgtacctacgaaccaatcgtgcagtttttgggagcttttcgcaaagcagagcagggttgccatgtagaaggggacggtgggcagaatgggaagcacgatccctacggtgcccagaaccatgcaaagaaagcccagtacgatccagaatgcttttaagagttttttcatcatcttctcctgttgatttttgtgttgctgcacggcagtgcagagcgagcgtctacgtcacagtttcaaaacggagatcttaaatgttagctataactaacttcctgtcttatgaaaagccgcccgttggcgacttttctggagagataatacgatattctggaaactttgtcaagatgtactttgcggagcgttgcgcctgttacccgtatattttccctacgatctttccgcgcacagcagcgggcagaagcttgcacagcaggctcaggaatttatactgtgcaccggcaacataaacgacggcgggtttctttttctccacaatgccggcaatgtaccgtccgatgtctgccgggtccatgccgttttgctcgtcgtgctccatctgactgacgctccgggagatgcgtccgccatattcattatcgccgagaatacttttctggcgtgcttttgtaaatccggtgcagatgtctcccaactctacaacggtaacatggatgccatagggcttgacttcgtttgccagagcgtaagagtaagaagaaacggcagctttgcttgcagagtagaaggtctggaatggaatgtgcgctacggcggcaacggagctgatgttcacaatatgccccttcccctgacggcgcaggaaggggagaactgctttataacagatagcttttcataagcgagtgacctgaaaaaggctgctcgcttttttatcgtcatcgcagtatttttgagggaacggctttttgccggtaagggataaacgcgtgtcgtaaaaataagtgctctttacgagaaaaaattcttgaaacgcttttgctataatgttacaatgtatactatataatggtatatattcaaaaagctgctgacagcagaacgagaatgatattgcaagcaccttcctgaaatcggtgaagtgaaaataaagccggaatgagaccgtctggggcggagaaagattggataaaatgaaaaactctggaatgagcgaaaccatgcagaccttgatgcggaaaagcgcctgtgtgatgctgagcctgctgctattgctgtcagtcgtgctccctgtgaaagctgccgcagagaccgcccctgcaaaggtcgtccgtgtcggctcgtttgaggatactttcaactatgtcaacgagaaaggcgcaagaaaaggctacggctacgaattgctggagaccttatccggctatacgggctggcagttcaagtatgtgacctgcgactggtcagactgctttgaaaagctcgaaaacggcgagatcgacatcatgggcgatatttcctatacggaggaccgcgccggggagatgctgttttcagacgagccgatgggagtggaaaaatattacctctacgctgatctctcacgcgcagacatctccgcctccgatttcaaaacgctgaacggcaaaaagatcggcgttctgatgggaacggagccggaagtgatgctgaccgagtgggaagaaaaatacggcctgaaaacggaacacgtcaacgtctccaacaacgaggatgtaaagcaaaaactggcaaaccacgagatcgactgctttgtctctctggaagaatccttctgggcagagcttggcatctcgaccataacccgtgtgggagaatccggcatctactatgcgatcaacaaaaaccggcctgatctcaaggaagaactggacagtgcgatgcgcgcggtggaggacgaggctcctttttatacggcagatctgtacaaaagatatttctcaatggattatacgcccatccttacgggggaagaaaaggcgtggctcacagagcatggcgcgatcaggatgggctttctgacgagcgacagcggcgtcagcacctttgaccctgccaccgggaagcttaccggggcaatcacggactatattcagtttgcagcagattgtctgggcaatcaggaactggaattccagctggtcggctatgacagcaaggaagcagaactggatgcgctgagatccggcgagatcgacatgatcttccatttcgaccagaaccccaatctggcggaagagtatcactttgcccgtaccaacacaacatggatcaccaacctgatggcggtcacgaacaaacagtactttaacgaaaacaatgtaaaccgcattgccgttccccaaaacaagctctccctgaaaaagtaccttgcgttttattacccgcagtgggagatcgtggactgcgatacacaggaggatgcggcaaggctgatcgaaaccggacaggcagattgctttattacagggatcagcagtgaggaaaattacagtaagaaatacggaatttacagcgttctgctgttgaaccctgtaagatcctgctttgcggtcaatagcggaaaccgcagcctgttgtccatcctgaacaaaacgatcaaggcaatgcctgttaatatgcttgccggcgcgcttgcgatgtataagagctccgcgcggaaggttaccctgagcgattttataaaggataacttctttatggtgctgctgatcagcagcattgctgttgcagttgttctgctcacgattttgatgctgctccagaaggcgcgtaaagccgaagctgctgcaaggaaagctgcaaacgatacgcaggaactgaatgcaaaattgcaggtcgccgtggaaaaagcggagagcgcgaaccgcgccaagtccaccttcctgttcaatatgtcccatgatatccgcacccccatgaacgccattatcggctatgcagaccttgtctcccggcatctggacgaccctgcaaagctggaaaaatacatggagaatattcaggtatgcggacagaacctgctgatgctgctgaacaatgtgctggatcttgcccgcattgaaaacgacaaaacggagatcgaatattctgtttcggatatcgaaaaagatttccgcaactgcattgcgatattccagaatcaggcagacagcaaggggcagacgcttatggtgacgacacagctgctgtatccgtatgtctatgcggatatcccgcacctgaccgaggtgtgcacgaaccttgtcagcaacgcggtcaaatacaccggtgcctgcggcacgatctgctgtgatatcacgcagaagcccggcgaaaaagagggctggtgcaatacggtgatcacggttgccgataacggcatcgggatgtcgcaggagttccagaagcatatctttgagccctttgaacgagagcgcacctccaccgtcagcaaggtggagggcagcggcatcggaatgggcatcgtgaaaaagctggtcgggctgatgagcggcaccgtggaagtggagagtaagatcggtgtgggctccacatttactgtcaccattcccagccgcattgcatcgcaggaggaaacacaggcgaaacgagagaccactccttcggacgaaaagagcctgtgcggtgtaaagatcctgctgaccgaggacaacgacttgaatgcagagatcgccaccgaactgctgcgggaagaaggctgcgcggtagaccgcgcaaaagatggcgtggaatgcgtggatatgctggaaaaggctgcgaacggaacttaccggctgatccttatggatatccagatgccggtgatgaacggctacgatacggcaaaaaagatccggcagatggacgaccctcaaaaggcaggcatccccatcatcgctatgactgcaaatgccttctccgaagataaacaggcggcgctggatgccgggatgaacgaccatgttgcaaagccgatcaatatgaacatccttgtgccgaccatccagaaatacctttgatgcggacagaaaactttgcataaggatgcttgcagaccgcaatacactcgctaaacgaataccgccgaggatgcttcccgttttgggagacatcctcggcggttttttatcgcaattttcaaaaatagtgtgcttattcaagatgcagaggtatgtggcattgtagcagagcccgtattttttgcatgggcagagtgcccattgctttcggcagaacgacagaaaatttcttcaaaatttgtgcaactttcaacgaatgcaaagtgactgacggtcagcactttattatttttatctggacaaggatttttgcggtttctcctgccggaaatgtatcccaaagacggtccttactttagtcatactcatttgacagaaaacgcttcttccggtattctgtccgtatcgcaaggacggcgggcaggaaaacccgccttttttcgtttgttctgtatttatggggaggacaacttatggcaaccatgaaagatatcatccagagcccgctgctgctggcgctggtcatcggcggtcttttgtatatttctgcattctcgctggtctatctcaaaaaggcctacgaccactgtctggagctgggcatcacacgcaaggaactgagcaacgtgatcaaatccagccttattttttccgttgtgcccagcctttccatcgtggtgggcctgttcgtgctcattgcggtgctgggcagcgtgtgggcttggtggcggctgtcggtcatcggctcgctctcgtatgaaaccatgatctccagctccattgcgcaggtgctgggctacgcatcctctgcagaaatgctggaaagcgccaccggacggcagtttggtgtggtgatgatcctgatgagcgtgggtatgctgagcggctttctgatcctgctgccctttggcaaaaagctgtgcaaaagcgtggaccgctctgcagccgaaagcggcggcagcacatggaaaaacgtgctgtccggtgtgtttatgctggtgatgttctcggtgtacatccccatcctgctgttcaccgataatgtgcaggctgccgttatgatcaccggtcttgtgatcgccattggtgtgggtgtgctggcaaagcgcccgggtcttgcatggctcaataactttgtgatggcattttccatgctgggcggccttgtctcgtcgctggcatgggtacggatcttcggttaaggagggaaacggacatgagtaaagcaaagactgagaccaaaatggactccttccagagctgggcgcaccgctggggacgcgtgggcaccctgatcgtccttatttacatggtggcgctgccctttgtggtgctggctgcctatgacagcatcccgtctctgggcgaggtgttcaacgtgaacaccttctccatcctgctcatctacatcccggtgggcttttcagaagcactgagctacacccccattctgggctgctcggcgtatctggcgttcatcaccggcaacatcatgaacctgaagcttccggtggcggcaaacgccatgaacctgaccaaaaagcagcccaacaccccggagggtgaggccattgcttcggtggctgttgcagtctcttccctgatgaccgttgccatcctgacgctggcagcggtgtgtacctccttcatcagcccggtgttcgagctgcccgccgtcaaaactgcttccggctacctgctgccggctttgttcggctccatggcactgggtctgttcgccagctcgtccagcggcagcaaggtggtcaaaggcggcatcaagggcgtgctgccggtgctgatcatcatgacggtgctctccctcgccgcacgtcttgcaggctacggctcagtgctgggcgggcttgtgggcatctttatcatcgtgatgctgcccatcggcatcctgacctcctatgtgctgtggaaaaagggtaagatccaagtggtggacaaggagcaaaaggaaaaataagctaaaaagtctcctgacgaaaaaagtcggcggatgacgatactttaacaaacgaacggacttctgcgcgtgtttggacgcctgcagaagtccgttttgcgtgcagagacttttctgcggggaaaaagcatggtatactgaaggcagtgaaccggaacggatcaatgaaagacgaggaatgtaaaatgaacatcgaagaacgggcggcacaggcagccgcatggaaagcagccggacagtgcaactgcgcacaggcagtgctgaaagcattcgaggacaagctgccggtggacaccgacaccctgatgaagctgggcgcaggctatgccgccggtatgggctgcatggaaagcacctgcggcgcattgatcggcgcagtgatggtggcaggcgtcgtcaccaacggcaagggcacgccccgtatctccaaggaattgctgcaaagctttcaggaaaagtgcggcgctaccatttgtaaagatctgaagggtgtggagaccggcgcaccgctctgcccctgcccggaatgcgtccgtaacgccgtgctggcactgggcgaggtgctgggagagtaaaatgaagaaggtgctgtttgtctgccacggcaatatctgccgcagccctatggcggaatttgtgatgaaggatttagtggaaaaggccgggctttccgcgcagtttgaaatagcttcggcggccacaagcaccgaggagatcggcaacccggtctatccacctgcccggcacaagctggcagagcacggcatctcctgtgcaggcaagaccgcccggcagatgacccggcgggactatgagacctacgactatctcattgccatggatcacaacaacctgcggaacatggagcggtttgtgggcagcgacccggagcacaaggtgtcattgctgatggaccacacccgccgccccggcgacgtggcagacccgtggtacaccggagactttgaagccacatggcaggatgtgctggaaggctgcaccgccttgctggaagagctgcgataaaagaaagcactttcagaaagatcgccttaaagaaaaaacagtgccccggagagtttttttgtcgctctccggggcgctgttttattgcggtgtctcttttgtgcgcagacgccggcaggcgtcctctttcacaagctcgatgaccaccgccgtcagggggataaagaagatgatgccgatgatgccaaagagctctccgccgatcatggcggcaacaagggtgtaaagcggggaaagccctacggactttcccaccacacggggatagatgaactggttttcaataaactgtacggcaagatacacgataaggcagcgcacggccagcacagggtcaaccagcagcacaaggaacacgctgactacgcaggagatcagtgcacccacataggggatgatggcgcagatggcggtcagcacccccaccagactgccgtagggaatcctgaaaatggaaaacgcaagggccatcagaacgccaaggatcaccgcttcgctgcattgtcctgtcagaaagcttgcgaaggattgacggaacagccggcagaatttcaggactccggcggcgtggtcgggcttcaggtaggcacacaccagtgtgcgggcgtgatggccaaggctctccgtcccaagggacatatagatggagatgatcagcgcaaacgaggcagtcaccacgatattcaccgtggcggatacggcccctactgcattgaccagcacagtgtcgatgcctgcggtgatcttgtgcagcagctgttcccagttgatgccttccagccagctcatcagccagcccatgtcggtattctgtgcgctgagataggcggtccagcgggggatgttggcttcgatctgcacataaaggctgtggaaggactgtaccagctccgggatcagcagggtcaaagccagcaccagcaccagagcaacacccagcagggtgatgaaaaagctgagaagatggatggctttagccgagggctgctttttcgccttgcggaacaggcttttcagccgcttttccagcccggtcatgggcacattgatgaaaagcgccagaataccgcccgccagaataggcagcaccagatctatgagctttgcggcaaaggccagaacggcagagagccgtagcagcgctacaaaaagcgttacccctacaacggtaacaagcagatactgttttgtttttggttccatgcaaagatcctttcccggaggtttgtggcagcaggctgcaaaaagaccgtctgcggacttttttatcgtattttttaaaaatagtgcctgtcagaacggcatacttgtgagatgcagtttgcggatgctgcttgtgtatttatagtattgtaatcagaagaaacaggcttgtcaagacgatgcaaaatggctgcgcagctttatgacagtaccattccgctctcttgggaggaaaatatagctgcggtacggtttctgacgatattgctgccggggcagcgcgaatttttttaaagctccgcctccaaaactgcgtattttggatatgcagttttggggcgtttgcgtgaaaaaatgcaaactgctgcaaaaagccgcggtaccgtaaaaaggggaaataaaaggactgaaaagcaggctgcggaaaggtacggggactgctgtgcctgtgctgcagatgcataaaaatcggcttttttcggcaggggaacagcctgaacggcggcgttctgctgggcgcgatcccgggcatgaccgccaccatgggcgtggcgctgctcattccgttctcttttggtatggatctgatcccgtccatcggcctgctgctgggcatctactgcggcggtatgtacggcggctctatctctgccatcctgatccatgcccccggcaccccggctgctgccgccaccctgctggacggttaacccatgtgccagaagggacaggccggcaaggctctgtccgttgcaatgttcgcttccttctgcggcggcgtcatcggtgctctggtcatgaccttcctctctccgctggtggctgatatggccatgaactttggccccggcgaaatgttcatactggctgtctctgggtgttcccggcgactccgtcaccgcgatcctgctgggtgcctttatcatgaagggcatcaccccgggccccatgatgtatgtcactgagctgcccaccgtttaccgcgtgtttgcggctctgatgctggcaaacctctgtatgctggctgtaggctgtctgggcgtccgcttctttgccaagatcgtttcggtggagaaaaagatgctgtaccccatcattctggtcatctctctgctgggtgccttctccatcaacaaaaatgcctttgatgtgggcgtttgcgtagccttcggcatcattggctggctgatgaataagtacgagttcccgctttcgcccattctgctggctctcattctgggacccatgtgcgaaaagaacttcgtccgctacatgaacatccagcgcggcaacttctttgccatcaccacctctcccatcgccatggtctttgccgctgtggccattctggtcatcgtgttctcgatgtataatcagagcaagatcaacaagaaagcagccgctactgcacaggagaaagcataacctcctgacaagcactgccggataaataacaaaagcgcagctgtcctgtttttgcagggcggctgcgtttttgttatacgctgcggctgtaaaaaacagatgcagtgcgaactgcggcgtacccattgaaacccgttggcatttcaaaaaagcgctgatgatcgccggtaggcagtggcaacgattttgtttctgctgaaaagctcttgacaacgggaacttttttgattatagtagaactaacgaacattagttagcaaagggcgaagaaaaatggaagacaccaaacagcgcattctggaaaaatctctggaactgttttcgaccaaagggtatgattccgtcagtgttggcgaaattgcaaaggcggtcggtatcaaggcaccctcgctttacaaccatttccccagcaagcaggcgatttttgatgccatcgtggaatcaacggctgcccactacgaaaaagatacgggcaggatcgacattcatgtgcagaatgtaaagcaggactgccctacgttttctcatatcccggagcaggctcttgcggacaaagtacggcagatctttctgtattctttgcacgataagcaggtcagtcagttccgccggatgatgacgctggagcagttccgctccccggagcttgcagcactgttctcggaacgctatgtggaccgtatgatcgcttaccatgcaggaattttccgctccctgatcgcagacggtgagattcgggacgaggacccggatacattggcatggatgtacgtttccccggtcattactctgctcagcgtctgcgaccgccagccggaacgagaagccgaaagccttgcaaagctggatgcccatgtaaagctgttcttccgtacctttaacattgagggaggtgaaaaataaaggaatttttgaattttatattgaagtagaaaaacgccataaatgctaaaatcaaaggagagctttttgaaacatacaacatttgcactgggacttgtgggctgaccgggaggtctggcaaataccacaagccactcctcccgaagacgaacagacacaattcttcaggaggacgataccatgaatcgtgaaaataaacgcaagacctttgaaaaaggttactataagacccacgcctgcaacgatacctttacctgcaaagtctgcggacggatctgcaccccgcaaaatgccggcagcgaccaccgcaaccattgccccaactgcctgtccagccttcatgtggacgaagaacccggcgaccgtgcctccgactgcggcggcatcatggagccggtggccgtctgggtacgcaagggcggcgagtgggccatcatccaccgctgtaaacgctgcggaaagctcagctccaaccgggtggcggcagatgataaccccatgaagctcatgagcattgccatgaagccccctgtgctctccgccgttcccgctggactatattgaggaaatgaccgccttgatgggcggcgatggacggatgcggtaagccgtaggagaaactacaagatggactatatcagagttaccaaggaaaacatcgacaaggaacacatatgttgtgccatgtccggcaaacagagccttgccaagaaggaatggctcaagcagcgctttgaggatggactggttttttaccgcagtgcagagcgcggcaagtgctttatcgagtacatcccggcagaaaacgcatgggtgcccattgatgcggcaggctggctttatatcaactgcctgtgggtctccggttccttgaaagggcacggctattccagcgaactgctggaagaatgccttcgggatgccaaggtgcaaggcaaaaacggcgtttgtattctgtgtgcagaggggcgcaaacgggagttcctcgcggaccccaagtttttgacccataagggcttcaaggtttcggacgtctccgattgcgggatcaacctcatgtatctgccccttgcagagagtgcccagccgccaagattcaaggcctgtgccaagcatcccaaggtggaggaaaacggatttgtcctctattataccgaccagtgcccctacacctattattgggtgccaaaggtgcaggagattgcaaaggaacataggatcccgttcaaagccatccacatcaccgagaaagagacggctcagaatgttcctgcacccgtcacaacatacgcattgttccgggatgggaagtttgtgacccagagcatccagtcggacaagaaatttttgaaattagcaggcgtagcggattgaaggattcaggaggaaaaaatgaaatatgatcaaacgattatcactccaaaaggactggcagtccacatccgaaacggtgcggcatccgatggaagtaccgtgcttgaaaactttaatctgacacacgcagaaacagattatctgctgagttatcccgacgaaaatcactttgacgcggaacaggaaagccgctacttagagaaaaaagaaaccagcccgaatgagatcgaactgatcgcctttgtggatggtaaagtggcaggaactgctggaatcgatgcaatcggaacgcagtataaggtggcgcatcgtgctgaacttggcatcagtatcctaaaagagtattggggcctggggatcgggcgagccttgatggaagcctgtatccattgcgctaaaaccgccggatacgctcagttggagttggatgtagtggcggagaacgcaagagcaatctccatgtaccagacggcaggatttgtggaatatggcagaaacccaaaaggttttcgctctcggaacgctggatatcaggaactgatctccatgcggctggaattataaatcttatcatcgatcaagacgccagacgcaaagacgcagagcagaacttgtgaaaacaagctgccctgcgtctttttgacaccggaaaggactttctatgaattttttgagattgatttttgggaggaaaagagccgtggatcgaatttgaaactctgtactccaccccgcggctggagcgcttgcggatctttatggcggaaaacaagattccctacaaggtgcgggcggcactgcttccggtgtcgctgaatacgccgatgcctaccggagcaatggctcagtccttgtggtacgttgcagttcgttccggggatgtccaccgggtgcagcactatcttcgcacagaaagggatatctaagatggagcagttattggtacgtctgctgttaacggctggcatcctgctgctgatcgcaggggtgatttttgccattctccaagtatggctctatactggccttctctgggcgggtgcgtttggatgcctgatggcagctttgaactttcggaatttcaaaaacgatggcggctaaagcacacggcatccccggtagacattcctactggctggaacccttgccagctgcggctggccgcccttctttaaatcccctctaggtcagcataaaaagcaaaacgccctgccgggatacggcaggacgttttgtttttatggacctagagggattcgaacccttgacctctcggatgcgaaccgaacgctctcccagcaatatcgcttttgtgcacaccttatgcaccatgagaaaaggaaaatcaacgtatattcgtccatataaaatgacctgccatcccaacggcctttcttggtcgcaagtatggtttccaatccgctgattttcaaaaggaagcgatttgggatgtgatatggttggcggacaagtgagctacaggcccttgagatgtaactcacttggggttcagatgtatcgcatcccgattcaaaagaaaacacgatgtaccgtaaaagcgcaactttcactcgaaaagaatggaagctgcgctttttgcccataaaatattcatggaaacattgatgatcgacaaaatcaaagataaagagtggtaccgttttatttagagtgatataatttattactaaattgcgaaattgtgagatcacctttttgaagacgatcaaagtcttgggagtaattagattctttgcagtgagtgataatttcgccggagaaattcgcaatattacgatatggtaaaagtgcagtatttattttgcgcagtagataatcaaggatttctcttttgaactccttgaactttgctgtacgccataaaaggtaaaaatcatccataaactgattatgattattccgaccgtaccaataaatttcttttgtattcttaagtaactggtattcttcgctttgagtatacttcgttaaatcaaactttaagtttttatccaaaataaaattagtgatttctgtaatatcacgcttgttgattttctttaaggctttagtgaaaattttacgagaacaacctatttcatgtaaatcgaatgtgatgagtctgtcgtttcttatattatatagcttgacatcattttgctttctatgcgaaataaaataagtgttttttctccccacaatcgaaacaattggatgaattgggacgaatgaaattcccattataatgttattgcaatctgtcaataaaactatttctgcgaaaaatctcccatattgaatgagattagctgtcatatgggaaagaagatcgtccataatgttttcaaatttccaaggctgctgagaagataatatgcttttcaacgtatcacctactggactaatatcataaaagcattgcctatttttgtctactgaaaactcaatagaatagcttctacaaaaatcatccaaaagcatttgcgtatataatccagataaaacttttgaattcttatgaacttcgaaattcggactaatttgagaagatttaaaattctctatctcatgattcatagttttcgctccaaccccagcaacttttatattttttctcatctggaagatagttgttaacggagacgatcataaaaacatcctctggattagttaagtctacatggtgattcattatggttattcccctataactttgtaaaattttacttgccgtctttaatctttcgctaaaatgatcataagtaacctcgaaacttggactgctggacatcacatgagctattcgctgtttccaatttgtttgaagagtatcacgatttccaataccgacaatgtcatgttgacgaaattgaagttgttgtgcgatgaccgacaaaatcgatagattcttcgagtcctttttgataaactcctttaaagttgtatcgattgagtctttccaacaagatgccccgttaaattcaccccaaataatagcaagcccactaattagagcatactcaaaaaatggcgcactagcaacatgaaatacaatttccgccagataagcttctttatgttttattacatccgttcgaatgtattcttggtagagaagcaccaagtcaaaatatcctctatatatttttttgaatctttcaaagtcattagattcaattgaccgaataagtgcttccgaaacatgattatagcaaagccccaaaaagtctggatagtcttctcgatttttccagtggtctagcgcatctgatacactacattttataagaacagccggaagattagtttctattttttgaatagtctgaactaatgagtctgttgaaactttttgccaaagaattgatttttcaatatgcttgttttctaactgtagcaaaatcttttcaattaaaagaatggcgcgtttgcttttgttgagtatttcaaacacgtgtgacagagcagttgcagcagcttgacaatggttttctgtatttagctgtataccaatttcatacacttctttaattgaaaactcaatggtaccgattacaataccaatatattgatatatttctttagcgacaatttgctgaatataccaattagctgtcaattttttgttttcaatggataactctgcggaaatctgggtaaataatcttttgcacatttctccattcagatatggaacacactgaatatcacactggtcaaaactggaataggttgtgcattgacgcaaaacactttcgacattcagattcgaaagatatctagttattccaagaatcaattcaacataatttgaacacataatatcaactatagacagtgcattttctttatcaaggtcatcgctcgacaagtgtttacaaataacagtccatgatgatattttgatttttttcagaacagaactccaatagtcacattgtcttttttctccagctatcagggtcaaactttgaagacatacaaaatattgttgcaatactagaatgtcatcatctttaaggattttattgagacattcttgatttacttttaataatgcgttttcaaaccaataattatctgttaccattttcggttgtatagatgttccggtttgaagagctactcttatttcggtatcatccgttgcatgccattgcggatattgagcttttttctcaaaccaaagtgaatcatattgaatgttttgttttttgtcccaataaaattccaggagcgcaacggatttattcataaatagacccattgattcgttttgatttttgggaatatttgcattatattgacctatttcaaagagaatatgaacgtcatgacttgcaattttcttataatgattctgaaagctttgatctgttgtaaatatgttgcgcttagagacttttttaatgatattatagagattctgaaattttgcatctccaacagaaaaagtatctgaaagcatatacgaacgatttcctgtaacactgaatgttataaccatttggacagttagaaaaagtagaacaataatggatgctattcctaaaggttgttcaaagacacattcaaacaaaaaaatggagcaaacaacgatatatctaataatttgattaatgcagctattggttataacatctctttgatatagcgttgctaagtctgaaggaacattcgaatattttgcagaaaaaatagaagaaatgttcgcacaataaagtcctaaaatcacccccgcgatgcccattccaccaattgtgatatctttaaacatatccaaagatacagaatccagctttaggtaagaaagcagtaatgcatcacatttctttaataaaagaacaaagacgattgcgagaaatatctgccataaaacgacctttaagatatcaaactgaatgtgcagtaggttgcattgtttggaaaacttttccttcaaaacatatattaatcgtttcgtgtcaaaaacgattttttgaaaaaaatttttgatagtccaatacagtcttgtattcatgctggatttccttccaccgaccaaacaaaggtcttacgcaaaaaatactatatatcaaaaaatcgattgaacaaaattcaaccgatttttacgaatcatatattttcggataattgcttttcctttataatggcatttttattgcgctgtttccactttataacagagctttcttgaatcttatgtgttccagttttatatacgattcgtttaaaaacgatgtactcagaaatcgaccaatgaatctctcgaatggtactttcaatttgctcaatggcatgaggaatatcagagcctttgagttcaatataataggcatttcctttagtatcatctaataaaagccaatcacaccgttcaggatcatgtcctttgggaaagacttctccatctactttgaattgtcgaatagccttcttgtcaggattttttgcttcatgtttacatccattctctgaagatacaaatgatgagcaagttcctgcacgataaggtacacagttattgatgttcggcattatctgaatcctcaaaatttttatcaataatgaaatcactcatattgttgatgtcaacagacgcttggtctatcaattcgttttttattagagtcaactcatcatcttggtctagtgcatcttctatagaaccgcccctaatataactggcactcacttgttttgggccaagccaatatcgtttgcgcaacttctgtttaatcttttcggcagcattacctttgctttgcccggcttgaagcatatagttaaaagttccgagcaaataaggactatgggtcgtaataagctctgcatttttttcgtcattgaggaaaagtcccaaaagctcaccaacactacgttgcgaacttggatagagatgagactctggttcttcaaggattaaaaaaactcttttatcttcaatcagataataaaaaagcaaattgaatacccaaatgatttcttgctggccagaggaggtgaaattgattttaatatatttccgctcatctaaatacaaacgctcttcaccatctacataacgatagctaccacccaaaatttctgtcgctttctcgcaaagaagcttgatggctggacgattcgatttgaatttttttgcagcttcagaatcttcggaagccatcacatcatctatatatccagatagcccacgcccaaataaaggctttaattttaaaatggtttcaatataacgtttggttacatagtcaatctggcgaagctgtgatccctccaatgaagtgaagatatagttcatctgctcactcagtattgtaatcaggttacggcctgctggaataaacacggtctcgtatggatcatggagggttttggtgagcacttcttcccaatggcctttcttaaaagcgtatggatcgagaaatacgttgtcatccaattcttgaaataactctaagaatccttccgaaaattgaatattaacataattgtgtcccggacgctcgtaatcttcattcaaagaaacacaaagagacattttttcatcgccgtagacgtaatccagcatcatatcagagggcataatccacgaagttccaaaaatttgcagaaatttatctttcattctagcctgcatagcacatttccagtcagtcttggctgaaaagactttagaaggaccaccctgcatcatgatatttaaaatgtcttgcttaatcgaacgacaatagtatatagcttttgcaacagtactttttccgtttgactgtgggccagtaaatacattgaattgctttatttctaatgtgcattcattgattggtcctaacttctttatatgaattgtatggttcataagttcacctttagtgttttgtgtcacattttcaatggcttcgtaagctctttttaagcattataccacagtttcattttcaatggaatagctgtaattaccttcttggactgctgctctttgaagtcgataactcatccgtactcgaagaaatcacaaaattagatgattcacaatcaaaaaggaggatgcctatggataaagactttatgctgaactattttaacaaagccgtacagcctgaatgggaggagctgctgaaaacaccgcgctaccaaccggcagcaagtaagcgtgacgcaatcgaacgggagttctttcggatgctgaacgatgagcagaaacgcaagtaccttgatttggaatccgccgtcatattggcagaatgtgacatcgcagaagccatgtatatgaaaggtgccgcagaccgtgagttgatgatccgttaataccatgagttacgactacttctatgggcagtcgggcgaactgttttcctacttccgtattccgaaagcactctttcaggacagccgtttccggcagctttccacggacgcccgaacactgtatggcatcctgcttgaccgtatgagcctttccgcaaagaacaactggttggatgagcaagggcgcgtgtatatcatctacactgtccgggaagtgcaggaatctctctgctgcgccgaacacaaggcggtcaagctgttccgggaactggaacaggccaatcttattgagcgcaaacggcgagggctgggcagacccagcttgatctatgtcaagaacttttcgtctggactgccgccaaaagcacaagtacagaattgcgcaaacagcaattcttgtgctgctgaaaatgcagttcaggtgcagccaaaaccgcaatctaataagactgataagaataaaacagagaggaacaatcctttcctcccggatgaatcggacagagaacaactcgaagattatttttatcaggcattggaggtcgaactgctgctccggctttgcccggatgatgaggacaccatctatcaaattgtggacttgcttgtggacacctgctccaccaaacgcaagatgttgaggattgccggggatgataagcccaccgaagtggtgcgcagtcggctgaaaaagctgaacgcagaccatatccgcttcgtgctaggctgtctggcagagaacacttccccagtgcgaaacatgaagcaatatttgttggcagcactgttcaatgcgcccacgaccatgaatctctattatcagaacaaaacgaaccacgactttgcgcgtggctctccgaaagcggggtgatgttatcgcaaagaaagctaccacaatcgccatcgtaaaccaaaaaggcggcacggccaagaccactacctgtgaaaatcttggtatcggtctggcaatggagggcaaaaaggttctgctggtggatgttgacccgcagggttcacttaccatcagtatgggctggcagcagccggatgagctgtccaccacattgtccacccttatgcagaaagccatgaacgaccagcccatccagcccggtgatggtatcctgcaccatgcagagggcgttgaccttatcccggccaacattgaattggcaggaatggaagttgcccttgtgaacagtatgaaccgggaaaagatgctcaagcaggtgttggacagtgctaaacgcgagtacgattatattctgctggattgcactccctcattggggatgcttaccatcaacgcactggcagcggcagacacgacactgattccgatgcaagcacagtacctttcagcaaaaggtctggaacagcttttgcagacgattggcaaagttcggcggcagataaatccaaaactgaaaatcgagggcattttgctgaccatgacggacagctgcaccacctatggtaagcagattgacaatttaattcgacaaggctacggtcggaagatccatgtgttcgagcagatgattccccattctgttcgtgctgctgaaatcagcacaacgggagaaagcatttaccagcatgacccgaaaggcaaggtggccgcagcctaccaatctttaacgagggaggtgttggcaaatgccgaaaaacaacggaaacttagctctgaaaggattagatgagctgctattttccaccgaggagcaacggcaggaagaaaaaagagagcaggtacagcaaatcctcattgatgagctgcatccgttcaccaaccatcctttcaaagttgtggacgatgaagccatgacccgaacagtggaaagcattgctcagtttggtgtgctggctccgcttatcgcaaggccgcgcccggatggtgacggctacgagattatctccggccaccgccgccagttcgccgcaaagatggccggactggaaactctgcctgtcatcgtgcgtgatatggacgatgatgccgccacgattctgatggttgattccaacttgcagcgagaacacatctcacccagcgaaagagcgttcgcgtacaaaatgaagctggatgctctaaaaaatcaaggtgctaggtcggatttaacttcccgacaagttgtcgggaagttggaggctgctgacgtgataggaaaagccaccgatgaaagcggcagacaagtacagcggtatgtccgacttacgaaccttattcctgaactgctcaatatggtggacgaaaaaatgatttcattcaatcctgccgtagagctgtcttatctctcgcctgagcaacagcaggaaatgataaaggcgatggacgatacgcaaaacgcaccttccgtttcacaggcaaagcgcatcaaagaactggcacagaaaggtcaattcacctctgatgctgttgttgccattatgggagaagaaaagaaaggcgaactggacacagtaactatcaaaaacgacatcctgcgaaaatactttccgcgcagttacacgccccggcaaatggaagaaaaaatcatacagcttctggatgcgtggcagaaaaagcgtcagcgtagcaatgagcgttgacagcgcatgaaccgataagacccgattgggtcttttattttgaaaaaaattaggaggtaacgcccatgaacaatacgattgatttcaataccgcaaagaccatcggcaccatgagcaagaaaatcgaccatatcgacgatacggtgtccggcttcttctctttcatgcacatggtcatgcagaacgaacttggcaatgcagagccatactttgcagcagtttctcccgttctggatttgaccgtgatccggcctgacgatgcgccgcatatcctgccctgcttcgatgaagcagatgagggtatcggcatttccgaagatgaaccgctgggcttctgctacaaccccaagcaggtcattaagctgatgggcaagcggtatctggtcggcccggtgattttccaccgcttcgatgatgagaggaattttgcatctctgacgatgagcgatatgtacaccatccagaaatatctggaaagcaacagtgtcactctgatgatcgaccgcgacaagctgacctgcatctgcatcgactgaggtgtgcatgaagaagtttgatgtggaaattacagaaacgctccaacgcacggtttctgttgaagccgattcgcgggcagaagcagagcggctcgttacagaagcgtggaacaatgaggactatgttctcgattccacagattttgtcggtgtcgatttcaaaaccgtgggtgagcaggagctttccgagaacagaaaaatggagattcttttggttcagcccggtatgtatccgcagaaagccaccattggcacggaactgaaagattttcaggatgctgtcggtggcaccattgcggcaagctatcctttcgatgatccggttgctatcgtgtataacgatgaaggtaagctgacggggctgcccttgaatcgtgccttgcgtgatgagcatggtcaaatgtatgatgttgttgccggaacttttctggttgtcggagagggtgcggaggattttgaatcgctttccccggaactggcacagaagtatgagaagcattttcaccagcctgaaacctttttgaagttaggaaatcgtctgttggtgattcctatcccggacgacgctgtgaagtccgccgagaataaagccgtgaacaagcccccagcggaacatgaccgttaaatccaaacttctgcacggggggtggtaaaatgcaggaagaagtcgagcagaaaacattcaacatcgtggtgtctactacaaagttgaccgcccggacaattcttaatgccggaaaagctgccattcaacagcagcaaacgaagatggctggcggcaaacagagcgtccgaatgctactgcggcagaatcgtggtgtttccagtgtggaaatcgacaaaacaaatatccgtgggtttgaacggtatgcaaaaaaatatggcattgactatgctattcgcaaggataactctgaaatgccgccccggtatctggtctttttcaaagccccagatgtggaggcatttaatgcggcttttaaagaatattccgcatcccttctgagtaaaaccaagcgaccctctgtactggaaaagctgcatgagctggtgcaagccgcagcagaacttcccggcaaggtgcgccgcaaggaacaggagcgcggactatgaccacaaaaaagctgacgaagctgcttgctctgtatctaccctatatcctgctgggactggtggcaacaaatttcggtgaagcatggcggctggccgagggcaaagaactgggcgataaaatcatgtctatggtgggaacgctgcctttagcctttgcgaatccgctgcccagtttgcacccattggatttgcttatcggctttttctgcggcgcagggttacggcttgccgtatatttgcgaagcaaaaatgcaaagaaatatcggcacggcatggagtacggctctgcccggtggggttcgcccaaggacatcgagccgttcatggctccaaaatttgccgacaacatcatcctgaccaaaacggaacggctgatgatgtccaaccgtccgccggaccccaagaatgcccggaacaaaaatgtgctggtggtgggcggctccggcagcggcaagacccggttttggctcaagccaaaccttttacaatgtcacagctcctatgtggtaacagacccgaaaggcagtatcgtggtcgagtgcggaaacgccctcctgaagaacggttacaagctgaaaatcctgaataccattaacttttccaagagtatgcactacaaccccttcgcctatgtccacagcgaaaaggacattctgaaactggtcacgaccctgatgaccaacaccaagggcgaagggtccggtggagaccctttctgggagaaaagtgaacgtcttttgctgaccgccctgatcgcctatctgcattatgaagcccctattgaggaacagaatttcgccaccctgctggaaatgctcaacaccatgcaggtgctggaggacgacgaggaataccaaaacccggtggatcttctgtttgaagaactggcaaaaaagaagcccaacagctttgccgggcggcagtataaactttacaagctggctgccggaaagaccgcaaaatccatcctgatttcctgcggcgcaaggctggctcccttcgacatccaagaactgcgtgacctcaccatgtacgatgagctgcaactggacacgctgggcgataagagaacggcgctgttcctcatcatgtcggacacggattccaccttcaacttcctcatcagcatggtctacacccagcttttcaatctgctctgcgacaaggcagatgatgtgtacggcggcaaactgcccatccatgtgcggtgcctgatcgacgagtgtgccaacatcgggcagattccaaaccttgaaaagctggtggcgactatccgcagccgtgagatctctgcctgccttgttttgcaggcgagaagccagttgaaagccatctacaaggacaacgcagacaccattgtgggcaacatggattcgcagatatttctgggcggcagcgaacctaccaccctgaaagacctgtcggagatgctgggcaaggagaccatcgacgcattcaacacctcggacacccgtggcaacagccccagctacggcaccaccttccaaaagatggggcacgaattattgagccgggacgagctggcggtgctggacggcggcaagtgcattttgcagttgcgtggtgtcagaccgtttctttctgacaagtacgatctgacccagcaccctaactacgagctgacctcggactatgaccccaaaaacaccttcgatattgaaaaatatctgaaccgaaaagaaaaaatctaccccgatgatgagttcatcgtggtggatgctgattcgctcccgcctgccagacccggtaggcggtttaattttatcctgaccagagaggtacaccagtaagctcactctcgccgcagttcgcggcttcaatatacagcttcaggcgtgtacggacggtctacaatgttcatttataaaggagaaacgactatggaattctttaactctgctatcgaagttcttcagactctggttgtcgctctgggtgccggtctcggcgtttggggtgccatcaacctgctggaaggttatggcaacgacaaccccggctccaagtctcagggcatgaagcagctcatggctggcggcggcgttgctctggtgggcatcaccctgattcctctgctgtccggtcttttcggctaatagagccgcaggcgggttttcccgcctgtacatacgcaatcgctccatctctgctgtggataacagccctttataataaggagcgcattgcatcgaatatccacctgataactgaaagggagtgttttctatgcagtttttgacccacatcatttttcttctgaacctgctcaagaccctcatcaatcacttcagctaaggacggtgaatgctgaatggaaaccgttctcaaagccattgccgattggatcaaaggcatcctgacggcaggcattatgtcaaacctttccggtctgttcgacgatgtgaatacgcaggtgggaaacatcgcccagcaggtgggcaccaagccctccagttttgagccaagagtgttcgccatgatcgaagccctttcccggaatgtggtgctgcccattgcaggcatcatcctgacctttattgcctgttacgaactcattgagatgatcacccagcacaacaatatggcacagtttgagcctgccctcatcatgcgctggatctttaagactgctgtttcggtctggctcatcagcaatactttcgacattgtgatggcagtgttcgacatcacccagaaggtggtgtccgattccagcggcatcattgccggaaatacccgtgtcaacgacattggtttgtccatgctgcaatccagcctgatgcagatggatgtcggacccctgttcgggctgtttttgcagtccttcttcattggcatcaccatgcggatcttgagcatcattatttttgtcatcgtgtacggaagaatgatcgagatatattgcatggtgagccttgcacccatcccgatggcgaccttcggcaaccacgagcaatcgcacatggggcagaactacctgagatgcctgtttgcgctgggctttcagggcttcttgattttgatttgtgttgccatttacgccgtgctgatccagagcgtggcgatttccggggatgccatcaactccatttggagcatcgtgggctacaccgttctgctttgtttcagcctgttcaagactagctcagtcacgaaaagtgtactgggcgcacattaaaaaggaggtgtgaattttggctgcttatatctccgttccccgtgatttgaccaaggctaaatctaaagtggcattcaacctgaccaaacggcagctcgtctgctttggcacagcggctctcattggagtgccgctgttttttgttctccgggattccggcggtaacactgccgctaccctcggcatgatggcggtgatgctgccggcgttctttcttggaatgtacgagaaaaatggtcaaccgctggaaaagctgctgtcatattatatccgggcgcgattccttcgcccgaaaatccggccttataagaccgcaaactactatgcgttgctcatgaaaggagggtcagcccatgccgttttggaaaaagaccagtaagggcggcaagaaaaagccgccgaagtccactgttccccggacagcgcagcagtccatccccatgcagcggatgttcgaggatggaacctgccgggtgaagccgaactactacacccggacgattgcctaccaagacatcaattaccagcttgctcaacaagaggacaaaaactcgattttcgaggaatggtgttcgttcctcaattttttcgacagctccatcaagtttgaactgtcttttgtgaacatggcaacggatagcaccgagtttgagaaaagcatccgtattccgttccagaaagatggtttcgatgatgttcgtgccgaatactcgcagatgctgcgccagcagcttgccaagggcaacaatggtctgacaaagaccaagttcatcacctttggcgttgagggcgagagtatgcgtcaggtgaaaacccggctcgaccatgttcagaatgatttgctcaacaattttcatcggctgggtgtgcaggccaagcccctgaacggtactgagcggttgaaactcatgcacgatatgttcaacatggacggttcatcgaagtttcgttttgactggaaagacctcgtaaaaagcggcctttccgtcaaagatgccattgctccgaccgcttttgccttcaaaaacagccgcactttccagatgggcggcatctactgcgccgccagctttctgaatattacggcatccgacatcagtgatcagcttttgaaggattttctggacatggattccagccagattgttaccatgcacatccagtcggtagaccagaaccgcgccatcaaaacggtcaagcgcacgattactgaacttgatagaagcaagattgaggaacagaagcgcgcaatccgtgccgggtatgatattgacatcattccgtccgatttggcgacctatggccgggatgccaaggctctgctgaaagaattgcagagccagaacgagcgaatgtttttggtgacattcctcgtgctgaacaccgggcgtaccgagcaggagctggaaaacaatgtgtttcaggccagctccattgcgcagaagcacaactgcaatctctgtcggctggactaccagcaggaacaggggcttatgtcctctctgccgctggctgactgccaaatcgagattcagcgcggtcttaccaccagttccacggccattttcattccgtttaccacacaggagctttaccagtccggcaaagagagcttgtactacggtctgaatgcactttccaataatttgattatggttgatagaaagcggctcaaaaatcccaacggcctcatcctcggcactcctggctctggcaaaagtttctcggcaaagcgtgaaattgccaacgcctttttggttacagacgatgatattatcatcaacgatcccgaaggcgaatactccccgctggtgaatcggctgaaaggtcaggtcattaaaatcagccctaacagtacccagttcatcaacccgatggacattaacgccaactattcggaagaggataatccgctgtccctgaaagcagactttattctttctctgtgcgaactggttgtcggcggcaaggaaggtctgctcccggtggaaaaaacggtcattgaccgctgtgtgcatctgatttatcggaaatattttgctgacccctgcccggagaatatgccgattctggaggacttgtacaacgccctgctccagcaggacgagaaagaagctcatcatgttgctaccgctctggaaatctacgtcaagggcagtctgaatctgttcaaccaccgcactaacgtgaacatcaacaacagaatcgtctgttatgacattaaagaactgggcaagcagatgaaaaagttgggtatgcttatcgtgcaggatcaggtctggggacgtgtcactgccaatcgcagcagcggaaagtccacccgatattatatggatgagatgcacctcctcttaaaagaggaacagaccgccgcctattccgtggagatttggaagcggttcagaaaatggggcggtatcccgactggattaacgcagaacgtcaaagacctgctttcttcgcgtgaggtcgagaatattttcgagaacagcgacatgattataatgctgaatcaggccgctggcgaccgtcaaatcctcgcaaagcaactcaacatctcgccccaccagctttcctatgtgacccactccggcgagggcgaaggtctgttgttcttcggcaatgttattctgccgttcgtggacagattccccaccgatttggaactgtaccgcatcatgaccacgaagctgggtgaggtttcggaggtcgcacagaaatgagtaatccgaagctgaacttcaaagaggaaacgtcagtaaaaaagacacgctctcccccgaagaaagcgagaatcgagcagtccacgcccaaaaagaagaagctgaaactcgatgctgacaaggccgcagaaaaagcccagcatttgcgatttggcaaggcagaactgaccccggatgaattgagccgattgagcaaggcacagaaacgcgagatgtacgctgccaatgccgcccggactgcggtgcatcgggaaatcgaacagtatgaggaagataatgtcggtgtgcaggcgttgagcgagggcgaaaaggctgctggaaatgtccgcgatatttccaagagccgctatgcccgaaaactgaaaaagaaagccgagatgcagggcaagaaaaaagcccacaacacaaaatcttctgcacaggagtcagccggggcacaagatgcaggcgcatccggcaccggggagggtggttccaactggctctcccgatggcggcagaaacgcgacattcggcagggttactatgccgcagcccggtctggtggcacagcggcacagactgctggtggtaaaaaagccgtatccagcggtgcatctgccgcacggtctggcgtagagcaagtagtggacaagggaaaatctgtggtcggttcggcagtaaacggccttatgaccgccgcaaagagtaacgcacacgttctggtgatcgtgggcgtttttcttttgcttatcctcatggtgatgtccggcttttcctcctgcggcatcctcttttcgggcggcacacaggtgtccgggcagaccatgtactctgccgaggacagggacattcgcggcgcagagcaggactacaagaagctggaaaaggaactggataaaaaaatcaaacgcacccccaccgaccatcccggctacaacgagtaccagtatcaccttgaccccatcgaacatgacccatggcagctcacctcattcctgaccactttgtacgacgattatacccggtcggaggtgcagggcaagttgaaggaaaccttcaaaaagcagtacaagctgaccacatgggtagaggttcagatacggtataagacggtctgggtcatcagcccggcaggaatcccggttcctacgcaggtgccgtatgaatacaagattttccacaccaaactggaaaatcgaggtttggaggttgttattcgggaagagctgaccgaggatcagtggcagaggtatcagatttttcaggacaccttgggtggtcggccatatctttttaatggtggtttgccgcccggtggctcggatggctccggcgcacccggcatcgtctacacggttcctgcggaagctctaactgacacggagtttgccgctatctatgaggaagccaaaaaatatgttggcacatcctacgtctggggtggctctaccccggaaacaggctttgactgctccggctatgtctgctgggtttataaccaaaacggttatgatgttgggcgcaccaccgccaacggattatggcaaaaaagtcggcatatttccgaagccgaagcaaaacccggtgatttggttttcttcaaaggaacgtatgatacgccggggatgagccacgttggaatatatctcggcaacggaaaaatggtcagtgctggtgaccccatcaaatatgctgacattcactcgtcctactggcagcagtatctcgctggatttggacagctttcaaaatgaaatggagggttttactatgagtgaaaaactggataagctgcgcgcttctttggaaaaggaaaaggagcggcgcattaagatcaacaaccgcatcgaaagccttgagcggcggattcaggaagcagaagccgccaaggtgaatgaaatggtgcgcaccgccaaagtcaccccggaacagcttgctgctctgcttcggcagtcggctaataccactccaaatccggctgcactggctgctgtaggcgcaactttcgacaaggaggatgattcggatgaagtttaagagatttggcgcactgttgctgtcggcggtgctgtgcatcggcatggccgctcctgcttttgcctatgagggcgatactaccccggtggagcagcccgttctgccggaagtcgtggaggaggataccgtcactatcacggatgaggaatccggcgcactgaccccggagggcaatctgacgctggtggacgattatcacacaaactattccgatggtagcggccagcagttcatcacactcgtcagcaagtcgggtgcgactttttatctggtcattgaccgcaatgccaaaggccagcaaaccgtccacttcatgaatctggtggatgaagcagacttgctggctttaatggaggaagaagatgcagaagcctacaatgctgaaaaagaagcggtgaagcaggctgaactggacaagctgaaagccgaggaagaagccaagaaagccgcagaggaagcggaaaaagcggcagacgttccgaaagaaaacaaaatgacaaaatatgctgcggcttttctcggtgtcgtggcactgatcgcgctggcggctggcggcggtttctatttcttcatccagcagaagaacaagaaacaggcagaaaaagaagctattgacccggacgcggactacaccgaggatacgggtgactttgagattcccccggaggatgattcggaagatgaggatacttccgaggaacaggatgtaactcctatctgattttagggcggcggttgccgcctacataccataatccgaaatagattggagggaacgcttatcgcaattttgatcgtgaccgaaaagccgtccgttgccatgtcttacgccaaggttttgggggtgcaggggcggcaggatggctaccttgagggcagcggctatatcgtgagttggtgtatcggccatctggtagaactggctccgcccagcacctacgatgaaaagtacgtcaaatggaatgtagccgatctgcctatcctgccgcaaaggtggcagtaccttgtgtctgccagcacaaaaaagcagttcggaatcctgaaaaagctcatgcaccgcgccgatgtggagagcattatctgcgcaacggacgcagggcgcgaaggcgagctgatcttccgtttggtgtatcagcaagccgagtgcaaaaagcctgtttctcgcctatggctgtccagcatggaggacagtgcaatccgggagggctttgcaactctgaaaccgtcaactgaatacgatgccttgtatcaggctgcactctgccgggaacgtgccgactggatggtcggtatcaatgcgtcccggcttttttcgtgcttgtacggtcaaccgctggcggtagggcgtgttatgaccccggtgcttgccatgacggtagttcgggaagccgccatcgccgcctttgtgccggaaaaattctacacggtagatctggaactgaccagcggctgcacggcatccagccgccgcattcctgaaaaaaccgttgccgaaaacctgctggaagcctgtcgaaaggagatggtggcaacgatccagcgcatcacccgcaaggaaaagtccgagaatccgccgccgctgtacgacttgaccacccttcagcgggacgcaaaccgtcttctggggtacagcgcacagcagactttggactatgtacagagcctgtatgagaagaaacttaccacttatccccggactgatagctgctatatcaccgatgatgacgaggaaatgctggaggaactgaccgaggaactggaagtttttctcggcattaccccggagggcatggacgaggctgtgccccggacacggcgcaccgtaaaccgggaaaaagtcaccgaccaccacgccatcctgcccactcgcagtatgctgcaagccgatctggaggctctgcccaagggtgagcagaacgttctgaagctcatcatcgcccggacgctgatggcagtcagcaagccctttcggtatctggagaccctgctgaccaccgaatgtgccggggaggaatttaccgccaagggcaaggaggttctggaagaaggctggaaagcggtggagcgcaaggtactggcggatatcctgaaccgaaaacaggaactcaccgccctgcccaatgcagcagaaaacgagtgtggtatcctcaatgccgaactgaaagaggggcagacctcgccgccgaagcactttaccgaggacaccctgctgcacgctatggaaaccgccagtgcgggcagtatgccggagggcgtggagcgtcagggtatcggtactccggcaaccagagccgccaccattgaaaaactggtacagaagggttttctggagcgcaaaggcagcaagaaaaccaaggcgctgctgcctaccgacaagggcaaagccctcatcaccgtgatgcccgaagaaatccaatccccggaaatgaccgccgattgggaaacaaagctgctgcaaatcgagcgcagcgaaatggagccggaaacttttatgactgaaattaaagaaatgatctcctcgctggtaacgaccaccgaggctgcgaaaggagcgaatgcgcttatgaaaaacaaaattattggtgtctgcccgaactgtgggaagcctgtcgtggagcgtgaaaagggctggttctgtgagaacagggagtgccgtttcgtgctgtggaaggacaatgcttttctgaaacggctcggcaaacgcatggacgctcatgtggcggacaagctgctgcgggatggtcgggtccgcctgaaggactgcaagagcgccaagggcaagacctacaacgccaccgtgctgctgggcaccgaacccgatggacgcagcaagttttctctggaatttgagggtggctgctgatggagcagaaaaaagaagcggtttaccttatcaacgatgaacgctatctccacctccgggaaaacggtgcaggggtcggctttgccacttataacaaggtaactggcgagccgctggaaagtgggcagatctcggaaaagaatctgccgccagatggacaaaacaccatctctgccgcccggaactggtatctgtttgaactttcggacgatgaccgtaaggccatccaacaggaaagcgtaaagatcctcgaaaacatcccgcaggcgggcatcggcaggcggcgcatctgggagccggaaacgctgccgaaggatattcgtctcatcaacagccactatgacgacctctaccgcattcccgatggcggagttgtacaggtggattacccggatgggcgcagctttacggcacggctggaacatctggatgattatcactttgacatgggcggtctgggcaatgtgttccacatctgtcagtttgccgaggtcatggaacgaaaccatgcagatttctacccggagattcagacacaggacgagcaggctgcatgggaactgggcggcaaaggctaccttgccatccagtcctatgaggatggatgggactacaccatttaccacagcgattattctgtgatggacggcgggcagttgaatgccccggaactgaccattcaggaagcccgtgagcagattctggaagcacaccacatggaaaaaggtcggcggttgttgcaggactatgattttgtgatggacagagccgcagaagcagaagaactgggcgcaaaccaccgcccttccacattggaaaagctgacttcactggctggcgcaaaagaaaaatgcgatgccccggagtgcagccctgttgggtgccggaaagtgagggatgctcatgaactttaatggcgaagaattgacgctgatgatgctctacaattccggctcccggctgggcttgatgcaggagctgctgttgatgcagtgctatcttctgccggacgaaactgctctgcgcgaactgtcggagggtgttatcaaaaagttgaaacttatgaccgatgccgagtttgccgagctggaatttccacttaactaaattatgccgccgcttggcggcgtacataatagggggttacgccaaaagtaattatatggtataattattctatcgactttacggcttaaggagattttttatgggagaattcgatttcacttataggttgccccaaaacttttcaaggcgagtagttcaatatttggaacaactcgaatcgcccaatgttgcaagggcatttcaaaactgtacatacgattatgaagatttggggcttgcctattatgctggcatgaaaggcgataactgggataaaaaagcgttggactttacagttgagggttctccccgcgacattgctttgctaaaatcgaaagggcatatactgaaagaatctatcagcaaatcacttaagtcgtctgaatctggttttttactcaaagagatttattactttgaatctgaaagcgtagagcccattcccttgtcaaatgctgctagattaaatgcagatatagcctcatcgcaggttgtccttcgagatctacttcaaatagggcaacgcttttgtttgaattgctcatttaatggtgccagctcggaaaacagtatgaatgactattttcgagatttgctttttatgaaaggatacacagagataaaagaccaaaccagacatggcttatccgtaaataaaaaggattccgcagaagtagatatcttgttaacaaaagacggtaaagagattgccatttatgaaggcttaaaattatctagcgttagtaccacatacattgatactcatataagcaaagcagttgtaaactataatgctcttggaatctcaacatttattgttgcttatgtagatgtgtcagattttgactctttctggaatagatatgtttcttatttgcagagttatagctttcccttgttagtaaaatcgcccattgaagtatatccctatccagacgcagcggcacgtgtggcaagtaccatattatcaagagatgattacgattttcctgtctattttgttgctttcaagattccaagataattttctatattaactaagagcgggcaaccataaaacggttgcccgctctttttatatcctgaaatcgaaaggaggaacgcaatgccaaataaaacgcaagaatacctcaaccttgcccagcaaacagcaaaggaactgacccggtattgggaaaactggacggactacctgaccactgcatcccggctgtacaagtacagctatgcagaccagcttatgatctacgcccagcgacccgatgccaccgcctgcgccagtttcgacctttggaatgaccgcatgaaccgctatatccggcgtggctccaagggcatcgctctgttagaccagtccagcagtgttccgcgtctgcactacgttttcgatgtgagcgataccggggtgcgccgtaattcccgtgacccggatatgtggcagctcggccccgatctggttcagcctgtttcggaaatgcttgccagagagtacggtgttcagcaggaaaatctcggccagcaaatcgcggacatctgcggcaggctggtggattcctattgggataacaacagcggtgacattctcgacatcgttgacggctctctcctgatggggtatgatgaagccggacaggagttccagttcaaatctgccgccgcaatcagcatcacctatgctgttctcgaacgctgcggctttgagccggaaggtcattttgaccgggacgattttcaggcgatcttctccttttccactcctgccgctgtgtatgcactgggcaccgcagtcagcgagtgcagccgtgagctgctgcgcagcatcgaaagaactgtaaagacgaccattcgccgtcgtaacgtagaaaggagccaatatgaatatgaacagcaggaacgtgacctactcgaaagtcggagattatctgcttccgaacctgaccctgccccagcaggagaaagcattgggcaagtacgggcgactgcgccggacttacctgatgaagcatcgcccggtactgtacaactcgatgctcctgtcgggaactctgcatccgcacctgttggaagtggagcagagcgcggagagccggatacagcagaccatgcagaagctgctggagcagaatccggctccgaacaaagagcagcatcagatggagtgggtgcagcacatgaacagcctgaacgcacaggccgaggaactggtgatgaacgagctgatttacagctaagtttcttcgacacccacattcctaccgaagcgaaacaaattgaatccatcgaccaagcggagagcgataaatcgccctccgcttttgttttgtcgcaggcggagattgaaaatgcgctgcggagaggttccaatgttgaaggcagcaaacttcggatatggaaaatttatcagttgcagcctgaccgaaaactccgggcaaaagctcttaccaaagaatatgcaccgtatggccccggcggttcttcacacacttatctggacggaagcagtggttggcttgaccatgacagcaagggtctgacgtttgagcattatcccgaccatcagaaagtgcttctccgctgggatcgggtcgaaaaatatattgacctgatgattcagtctgaccgctacctgtcggacaaagaaagaagagccatcgactttcctcttgaactgaacgccgccagtgcagccgaatacactgcattaaaggcgcagcacccggatactctggttggatttgaagctggcggcaattttatgttctatggagaagatgctgccaaggtcgcaaaagttctcaacagtgctttgtttacgagagaaacagcactgggcgaagttcaggtcacaggctttccacctagcttatgggtaagaaagtcaaaagaattgtggtctgcgggcaatgatgtttaccttgccggattgaacgaagatgggactcatcaccagactaaacatctgcacaaagaggactatctgcccatcggctccatcatcaatatggatggccggaaatttcgggtcgatagcgtggattttgacaaggacaaagtttccttgcaggatatggctctggccgatgcccggatgccgattttccgggaagagccgctgactgttgtccgggaattgtacgaacagcaggatgaagcccttgatactgctccagaaaaaactcccgattacaatgtcggtgattccgttgttgtagaccttccaacccgaaccatcgagggaactattggctatgtaggcgaaaccgatgtgcgcatcgacaccagtgcacagggctattcgtggagcaatgaggtactgaacaagcagcagttcgaggatggactgcggcaggatgagccggaactttccgatgaagaactggataagctgcccacctctgtggaagttaacggcgaatggcaggctttcccggatgccgctgccgcagacaaagctctgaacgccgaacctgtgccggaagttgccgggaatttccacatcacggacgagcatttgggcgagggcggtgcaaagcagaaatacgcccggaatattgcagctatccgcaccctgtttcagttggaacaggaacaccggggtgccaccgccgaggaacaggaagtgctttcgcagtatgtgggctggggcggtctgccggatgcctttgacccggataagagcaactggtcaaaagagtacacggaactgaaagggctgctctccgaggacgaatatgccgctgcccgtggctctgtcctgaacgcccactacactagccccaccgtgatccatgccatctacgatgccgtggagcgcatgggcttccggtctggcaacatcttggagccgtccatgggtgtaggcaacttctttggaatgctgccggacagcatggcagacagccgcttatacggcgtggagctggacagcatcactgggcgtattgcgaaaaaactgtacccgcaggctgacattaccattgccggttttgagaccactgatcgccgtgatttttatgacctcgctgttggcaacgtgccctttggtcaatacagggtcaacgataaggcgtacaacaaacttggctttagcatccacaattatttctttgcgaaagctatcgaccaagtgcgtccgggcggtgtggtggcgtttgtcaccagccgctacaccatggacagcaaggacagcactgcccgcaagcacatggcagaacgtgccgatttgctgggtgttatccgtctgccgaataatgcgtttcgcgccaatgctggcacggatgttgtcagcgacattatctttttgcaaaagcgtgaccgccccattgaccatgagccggactgggtgcagttgggcaaaacagaagatggctttgccatcaaccagtatttcgtagaccacccggagatggttctgggcgtactctccaccgaaagcacccagtatggacgagaggaattgacggttgcgccccttgagggtgcagtgctggcagaccagcttgcaaaagcggtacagcatattgaggggcaatacaccgaagttgaggtagaaacaccagatattgcggatgccgaaaatgagaagcacattctcccggctgacccggatgtaaaaaacttctcctacacggtggtggacggcgaggttttctaccgggaaaattccgtgatgacgcaggtggagctgtctgacaccgccaaggggcgcgtcaccggcatggtggaactgcggcagatcgtcaacgaactgattcagcagcagttggaggattaccccgatgccgacatcaaggcaacacaggagcgtttgaacgccgcctacgatgcctttgccgccaaatacggtctgctgaacgaccgcaaaaatgggcggctttttgagcaggattcctcctactatctgctgtgttcgctggaaaatctggacgagcagggacagcttaaatctaaggcggcgatgttcaccaagcgcaccattcgcccggagcgcaccgtcaccagcgtggatacccccagtgaagcactggcagtgtccatcggggagcatggcaaggttgatctgccttatatggcagaactgctgggtacacccggcgagtacgggcgcatcaccacagagttgtccggtgcgattttcaaggaccctgccgccgaccctaccgaccccgaagcgggctggcagatggcagacgagtacctgtccggcgatgtccgggcaaagctgcggatggcacagcttgctgcggaaaatcacccggagttcaaggttaatgtggacgcactgaccaaggcacagcccaaagatctggaggcatctgaaattgatgtgcgtttgggtgccacatggcttgcgcctgaaatcattcaaaaatttatgaccgagactttccagatcccctactatctgcgtcatgcagtcaaagtgagatattctccgtataccgccgaatggcgtgtggagggcaagacggcaaccgggcggagtgacatcatctcctccgagacctatggcaccagccgcgccaacgcctataagattctggaggagactctgaacctgaaagatgtccgcatctacgacaccattgaggatgccgagggcaaacccaaacgtgtgctgaacaagcgggaaaccatgctggcgcagcagaaacagcaggtcataaaggacgcttttgccaactgggtctggcaggaccctcagcggcgcattgcgctggtaaaacagtacaatgagttgttcaacagcaccagaccccgtgagtatgatggttcccacattcactttgttggcatgaacccggaaatcaccctccgggagcaccagcgcaacgccattgcccatgtgctttatggcggtaatacgttgcttgcacacgaagtgggtgcgggcaagacttacgaaatggctgcgtctgctatggaagccaaacggctgggactgtgccagaaaagtctttttgtcgtgcccaaccatctgacagagcagtgggcaagcgagtttctgaacctctaccccaatgcaaaacttttggtggcacggcgcaaggactttgagactgccaaccgtaaaaaattctgcgcccgcatcgccaccggggactacgatgcggtcatcattggccattcgcagtttgagcgcatttcgttgtcctttgagcggcaggagcgtatcattcaggagcagatttatgaaacccttgccgccatcaacgaactgaaagcccatgcaggtgagaatttcagtatcaaacagatggaaaagacccggaaaacgctggaaaccaagctggaaaaactgcgctccgatgagcgcaaagacgatgtgattacctttgaacaactgggcgttgacaggctttttgtggacgagagccatttttacaagaacctctttttgaccacaaaaatgcggaatgtcgcaggattatccaccagcgaagcgcaaaaatccagcgatatgttcggcaagtgccgctatctggacgagatcaccggcgggcggggcgtggtgtttgccacgggtacgcccgtgagcaactccatgaccgaactgtacacggtcatgcggtatttgcagtacagcaccttgcagcagaaaaagctgacccacttcgactgctgggcatccacttttggagaaaccaccactgcaatcgagcttgcgccggaaggtacaggatatcgggcgagaacgagatttgccaagttcttcaacctgccggagctgatgtccatgttcaaggaggttgcggacattaaaacatccgaccagctccatctgcctgtgcccgaagcgaagtttgaaaccgtggtggcaaagccctcggaaattcagaaggaaatggtgcaggaactgagcaagcgtgcagcagaaatccactccggtgcagtagatgcctccgtggacaatatgctatgcgtcaccaacgatggcagaaaaatcggtctggatgtccgcctgatgaaccctatgctcccggatgacccgaacagcaagttgaacgtctgtgtgcggaacgtcctgaagatctgggaggaaggtatagaccagaagctgacccagcttttgttctgcgacctctccaccccgaaaaacgatggcaacttcaacgtctacgaggatattcgcaaaaagctgatcgccgccggtgtgccggaaaacgagatcgagtttatccacaacgccgacaccgaagcgaaaaaggcggcattgttctcgaaagtgcgctccggtgatgtgcgcgttctgctgggcagcaccgcaaaaatgggagcgggcaccaacgtgcaatcccggcttgtggcggtgcatcatctggatgtcggctggaaacccagcgacatgacccagcgcaacggtcgtatcatccggcagggcaatatgaataaggaagtcaaggtgttcaattacgtcacggaagggacatttgacagctacctcttccagactcttgagaataaacagcgattcatcagccaaatcatgacttccaaatccccggtgcgctcctgcgaggatgtggacgagcaggcgttatcttacgccgaaatcaaggcactgtgtgccggaaatccgctcatcaaggagaagatggatttggacgtgcaggtggcaaagctgaaggtgctgaaagccgaccaccagagccagaaattccggctgcaagacaagctgctgaccaagttcccggcagacattcaggaagcgaatgcccacattgccgggctgaaagtcgatgcacagcttgccgccgcccacccgcagggtaaggaggaattctgcggcatggtcatcaagggcgtgacttacgatgagaaaaagactgccggtgagcgtctggtgcttgcctgttcggaactgcccaacgccgaggaaaaagtcatcggcagctaccggggctttgaactgtccctgcggtttgacgctttccgcacggagtatcaggcacttttgaaagggcagcggaaatacacggttcccttgggcaccgacccactgggcaatattatccgtctggacaattcgctgaacaacttcccggagcgaattaccgccgcagagaacgagctggctaccctgcatcagcagcaggcggcggcgcagatcgaggtggaaaagcccttcccgcaggaggaagaactggcggagaagtccgcacggcttgcagaattgaacgcccagttggatgtggacgaaaaaagccacgagccggaacaggatgaggaacctcgccgttcctcggtgctggcggctctggaagaaaagtctgataaggtagagcccatcaagccgttcaaaagctatctggacaaggatggtgatgctcgatgaatggcctccgcgaccagcagttgcatttccgtgtcagcaagcaggaactggaacggatctggagcaagatggaatccagcggtattttgagcattggctcttatctgcgaaaaatggctctggacggttactgcctgcgtttggatttgccagagttgcggcgcatggcctatctcctgcaaatgtgcagcaacaatctcaaccagtataccaaagctgccaacgaaaacggtcaggtctatgccgccgatctggaggacttgcgcacccggctggatgagctgattgttattggcagagagattctttcccggctggctgacctctgattttcaccccacggctttagctgtggggctacatattatataaggataaaactgtgggaggtggtgggcatggccgcaacacgcttgattgcgctgcacaaaaataagggaaaatccgtggcgacctgtttgaaaagccgcacagactatgcacaaaacccggagaaaaccaaacagggtgaacttgtcagcagctacgagtgcagccctctgacggtggacgaagaatttatgctgtccaagcggcagtatgaacttgccactggacgtaggcagaaaagtgatgtgatcgcctatcaaattcggcagtcgttcaagcccggtgagatcaccgccgaagaagccaacaaggtgggctatgaacttgccatgcggtttaccaagggcaagtatgcgtttattattgccacccacacagaccgggaacacattcataatcacattatctacaactccactgcgctggacagcacccggaagttccgggactttttattgtccgggctggccgtgcagcggttgagcgatttgatctgtctggaacatcagctgtctgttattgaaatcaagccgtaccgagaacggcagaagcgcactctttatcctcccagaaaaagcaatcgtgataagctgtgtgccgtaatcgacaacatcttgctgagcgagaaacctgcaagtttcgagggctttcttcaaaagctggaacagcggggctacgaaatcaaacggggaaagtacacttcggtcaaaggaacacggcagaagcgctttatccgttttcggacactgggagcaggatacagtgaagatgaaatcaaggcggtcattgcaggagatgccgaacactgcccacatcagaagcagccaccgaaagagcaaccgttccacctgttggtggacattcaggcaaagctctccgagggcaaaagcgaaggctatgcgcggtgggcaaaaaagtacaatctgaaagaaatgtccaagacgctgattttcttgcaggagaagaaaatcggcagcattaaggaaatgcaagagcgcgtggacgctgctactgctcgctatcacgaactgggcgattccatcaaggcggcggaaacacgcatggccgagattgctgtactgcggacgcacatcgtcaactacgcaaaaacgcgcccggtgtacgatgcctaccgcaaggccggatacagcaagcgatttctggaaaatcatcgcgcagagatcacgctgcacaaggcagcgaaagctgcctttgatgaatccaatttgaaaacgctccccaaggtcaaggagctggacgcagaatattctaagctgctgacagaaaagaaagcactctacccggactaccgcaaagcgaaagacgagatgcaggaacttcttcgtgcgcagcgcaacgtagaactgttctttgccgaagaaaagaacaccaccgagaaaacgcagtcccgataaacgatgacagcctaggattcttccgttgtggagagtcctaggctgtcttttttgttacagaagtgtttggaacaaatgcgcagcctgcatcggcacgatgcagatcgaaagggggttgggcacagcccaacaagcattttgaatttggatttgaaaaatacgattcaaaaattgcaagttggtaccaacttgccctgcttgccagttttgtttgggcgctatccttacgggaagtgtctaccctaaaagtgcgttcttgtcaagcccgccgtgaaatgctacctttaacatgaatacacggaaaggataaccactatgagagatatagaaatcgggcctatccgcccaccctctgaaagtaacagcctgctgatccgggtcacaaggggatgccattggaataagtgctatttctgcggactttataaatccatgcgcttctctatgcggcccattgatgaaacaatcgaagatattaggcagcaagcccagctcaatcagggaaaaaagattacttcctgctttttgcaggacggggatgctctggtgctgaaaacagattatttactccgcattttggaagcgatcaatcagggttttcccgatatgcagtacatcacttcctatgcccgcgccgatagtatcactcgaaaaagtccggctgagttaaaggcgctccggcaagcgggcctaaaccatctttacagcggaatggaaaccggctcggatcgaatactgaaacttatcaacaaaggctttgacgtggataccgttgttaaaagcggctgcatggcaaaagaagcggacatgatcttgtcggagttcatattgttggggatcggcggcaaggagctgtctgaagaaaatgctgttcaaacagcaatggcgttgaatatcatccagccagattttatccgtgtccatgccacgggtattaagccggagtccaagctgggcgagtttgtcagggacggctcttttactctgcaatcggaggaagaaatcgttgtagagcagaagctattcttgcagcaactacatgagatggacagttactatgtgaatgaacacatcatcaatttgcttttggaagtcagggggaatctgcggacagagaaacaggaaatgctttcaacgattgaccgtttcctggccctgccaacgaatgaaaaacttttgtttactgtcggcaggcggctcaatattttcttcctcttggatgatttgaaaaagccggagctgcaccaggaagcagagaaaaacctgcaacagattttaagtaagaatcccgatgttgactttgccgcactgtgcaattatgttcggcagtcgcagatttagagcagaaaatataagctgggcatagccgtttttcgtcagctatgcccagccttttatttgcgactttgacagcatggcggctgaacatccaggccgtccagatagttgtttccccactggcacattgcatccagaataggaacaatactctgtccaaatggggtaagagaatataccgtcttgggcggcttttctggaatcacttcacgatgaatcatgccgttgttttccagatcgtgaagctgctgcgaaagcatcttcggcgtggcgtttggaatcagccgctgtaactccatatagtgtaatggatggtcaatcagatgccagaggattaatggcttatacttgccgccgatcaaagacagggttgcctcaactgggcagttgaattgatttttttcacatttcataaaatggctctcctttcccgcaaggtgctatctttttgggaagtatcttccgaaaaagtgcattcttgcggttttgtgttcaagtgctacaattaggtcaatggttgatttgatatgctcaaaataaaaatactgaaaggactatatattatggattttattacgattgcaaagcagcgtatgtctgtacgcagctataaggaaacaaaggtggaaccggagaagctgaaaaagattctggaagctgctcatgtggcccccaccgctgccaacctccagccggttcacctgattgctgttcagagcgaggaaggtcttgcaaagatcggcaaggcggccgacatctacggtgcgcccctggccattatcgtctgcgccgatcgcgataaggcgtgggtgcggccttttgaccagaagcagaccggggacattgacgcctctatcctgaccgaccacatgatgctccaggccacggagctgggccttggaacggtatgggtatgctacttcaatcccgatgttctgcgtcaggaatttgacctcccggccaacctggaaccggtcaacatcctggttgtcggctactccaatgagaagcccgctgacatcaaccgctttgataaaaagcgcatcccgatgagccagttggtttcctacgaaacgctgtaattgaatacccgcgcagcccctgcaaaacagcacaggggctgcgtttttatctttctgaaatatgagcataggtttcttcaagaatccaccggatatgttcatcctgcaaggaatagatcacgcttttcccagccttgcgtgattgcactaaccggacaatccgaagcgcacgaagctggtgggatatggccgattctgtgacctccatcttttgtgccaattcgctgacgcaagaatctttctgcatcagataccaaagtatccgcatccgtgtgtaatcgcccatcgctttgtgaagctcggttaattgttccaattcgccgggacttggaacagaaaaagttgtttgctctgtttcgttcatgtatttttctccaatctataatgaagctgtttgacagacaagaattatgtcagtatcatagtcataggaaggagctgatttttatgccgcattacaatctaccccacaaccatggacagaatattgaaaaagtattaaataagatgccctctgcagaagggtttaaagatatatcatttttatttcagcagcttggcgatccgacccggctgcggattctgtggctgctgtgccattgtgaagaatgtgtatgcaatctcgcgtcggctgtggatatgagcgcccctgctgtgtcacatcatctgcggatattaaaaaagagcgggatcatttcaagccgcagggacggaaaagaagtttattattcgctgtcggacacgccgcaggcaaagctcttgcatcatgccatagatgcgttgtttgaaatatcatgcccgactgaacaataaggaaatgcgccgcagcgtgtgaaagttgcggcgcatttctattgcgcttaaccctgatttgtgctgcccgcaggcatatccggcagcttgacccgcatggcgcggatggcattgagaatcgcaataatggaaacgcctacatccgcgaacaccgccgcccacatattcgcatagcccagcgcacctaaaatcagaaccaggaatttcacgcccagagcaaacacaatgttctgatttgcgatacggatcgtcttacgggcgatcttcataacagcggcaattttggacggttcatccgtcataagaaccacgtcagcagcttcaatggccgcatcggaacccaagccgcccatagcaataccgacatcggcccgcgccagtacgggagcgtcattgataccatccccaacaaaggccaacatacctttttcgcttttctgcttcagcaggctttccacgcggtcaaccttatcagcgggcagcagttcggtataaacctgatccagatgaagctgccctgcgactttctttccaacggcatctgcatcgccggtcagcatgaccgttttgcggataccggcagatttcagcagcttgattgcggctggagcatcggccttgatctcgtcctcaatgatgatacatccagcgtatttcccgtcacaggccagatagaccacggtgccgacagccgaggatggcgtgtacttaatatgcgctctctccatcagcttggtgtttcctgccagaatcgttttcccatcaatcacggcctgtacgccgtgaccggcaatttcctggacatcggaaactcggctgttgtcgattttctgtccataggcgtttttaatagaaagagaaatcgggtggttggagtagtcctcagcgtatgcggccagctccaaaagctgcgcttccttcatgccgacagggtggatctcgctgaccgcaaaggagccttttgtcagtgtgccggtcttatcaaagaccacgacctcggtatttgccagggcctccagatagttgctgccctttaccagaacaccgatcttggatgcgccgccgatgcctccgaagaaactaagcggaatggaaatgaccagcgcacaggggcaggaaatcaccaggaaggtcaaggcccggtaaatccaagtgctgaatggctgctgggtaatcagcggcggcaggatcgccagcgccagagcagcaaataccactaccggggtataatacctggcaaagcgtgtgatgaaattctcaatacggcccttcttatcgcttgcgttttccacaaggtcaaggattttggctacggtggattccccaaattcttttgtggtctgaatgttcaggatgccggtctggttgatacagccgctgatgacctccattcccggctccacctcgcggggcatggattctccggtcagggccgaagtgtccagggtggagaagcctttgagaatcgtaccgtccagcgggatgcgctctcccggtttcacaacaatggtttctccgatctgaacctcgtccgggtcaacctgaaccagttttccgtccctttcgatgttggcatagtccgggcgaatgtccatcaggcttgcgatagattttctggacttggacaccgcataggactggaaccattcgcccacctggtaaaacagcataacggcgacaccctcggaatgttcgcccaaaatgagtgcgccgatggtggcaatcgtcatcagaaaattttcgtcaaacacctgtccatgcaggatgttcgtgattgccttccagacaatatcccagccgacaaccacatagcagatgagaaagaccgccatctccgccaattcagggagatggagcaagctgcctgcaagaaacagcactgccgccacgataatgcgtgtgagcaagtgcctttgttttcgtgtcatagtgtattctcctttcgttgcagcataaagcgtgtcacgctttttctgtctattgatgaaaaacaccggctaccttgtggcagccggtgtccagcttttcattacgccttaacagtcacatccggctcgatctgcttaatcagcgtctttgcttcggccagaacagcgtcaaactgatcgtccggcgcttccagaaccatcttctgacccaggaagttgacggatacgctggtcacaccgtcgatcttcttcacggcgttctggattttgtcagcacaatggccgcagtccaggtcaagcagtttaatggtctttttcatggagaaagccccctttcatttttgtatttggttggtttgatatggtatgaacgattaaaagattgtttaattgttcatgctgccagtatattcacgaaaaccctcaaagtcaatggatttgggagcggttctgccctttggattggaaaatctgccgatttgatttccagcaaaaaacctcatttctctttggataaaaaaagctccactttggagcggacaaaggagaagcaggataagtataatgaaaaacggtcaaagaccttgtgcgtaaactttatgttcggggctttagcatctttcccccaagatgccaaacgccccttttcataacggtatttagttccctacgggggaggggtactcgcacaaatctttataagaaagaagtgatgattttgcaaaaggagcaatttgacattacgggtatgacttgctcggcctgctctaccagagtggaaaagagcgtggcaaagctacctggcatcaaagaagtatccgtcaatctgttaaaaaacagcatggttacttcttatgatgaatccgttttggatacggcgggaatcgtccaggccgttgaaaaggccggctatggcgcgattcccaaagcctccgcacaaaacaagagccggacgaccacaccggcagcaaaaccggaggtcagtacggcacaggcagaatacaagcagatgaaacagcggctgctgctttctgccctttttacgatcccgctgttttatatttctatgggccacatgatggggtggccgctccccagctccttgctggggatggaaaatgcaatcagctttgcattcacccaattcctgctgctgatcccggtggtgtttatcaacttcaaatattaccggatgggcttcaagaccctgttccacggctcgcctaacatggattcgctgattgcgataggctccagcgccgcaattgtttatggcatttacgccatttacaaaatcggcattggatttggtcatggggatatggctacggttcacagctttatgatggatttgtattttgaatccgcaggcatgatcctgacccttatcaccttgggtaaaaccctggaagcccgcgcaaagggtaagacttcggacgcaatcacaaagctgatgaatctggcccccaaaacggccactgtggagcgggacggaaaagagcttcaggtgcctgtggaagaagtgcagttgggcgaaaccctgattgtcaaggccggtgagtctgtgccggtggatggtattgtcatcgagggcttttcctccgttgatgaatctgccctgaccggcgagagcatccccgtggagaagcatatcggggacaaagtgatcggcgcgaccacaagtaagtccggctatttcaagatgcaggccaccaaggtgggcgatgataccacgctggcacagatcgtccggctggtggatgaagcgaccagctccaaggcccctattgcgaaactggctgataaggtcagcggcgtgtttgttccggtggttatcagcatcgcgctgattgcagtcattgtctggctgctgttgggatatggctttgaatttgccctgtctatcggcatctccgtcctggtcatttcctgcccctgtgcgctgggccttgctacgcctacggccattatggtcggaaccggaaagggcgcaagcaacggtatcctgattaaatcggcggaggccctggaaacggcccatagcattgatacggttgtgctggataagaccggcacaattactcagggtacgcccgtagtgacaaatatgctctgcaaagagggcgttccacaaaaggagctgctgcaaattgccgcttcgctggaaaagctgtccgagcatccgctggcggacgcgattgtggcagaggccgaaaaagcacaactttccttcctcccggtggatgatttcaagcagattcctggtcagggccttgtgggtcagatcggaaacgaaacgtgccttgccggaaaccgccgactgatggcggcaaatggcatcaatggcggcgcactccttcagttgggcgaggaaatggccgttgacgggaaaacacctctgttctttgcccgtggcggtcagcttattggtgtcattgccgtggcagatgtagttaagcccaccagcaagcaggccatagcggaattgaccggcatgggcattgaggtggtcatgctgaccggcgacaatgcaaagaccgcagaagcgattcggcatcaggtcggcgtggatcgtgtcgtggcagaggtattcccccaggataaggagaaggaaatccgccgtttgcagagtgccgggaagaaagtggcaatggtcggtgacggtatcaacgatgctccggcccttgccagagcggacgttggtatcgctatcggagccggaacggatgtggcgattgagtcagcggatattgttttgatgaaaagcgatctgctggatgtgtctacggcaatccagcttagtaaggcggttatccgcaacatcaagcaaaatctgttttgggcgtttatctacaacatcatcggtattccggtggcggcaggcgtattctatcttccctttgcatggaagctgaaccccatgatcggcgcttttgctatgagtttcagttcggtattcgtggtgtccaatgccctgcggctgcgctggttcaaagcaaagcatcaggccaatacagaactggattcagaccctatgtacggacaaacaacgattaaacaagaacgaaaaggagcaattcacatggaaaaagtattgaacatcgaaggaatggtttgcggaatgtgtgtaaaacacgttgataaggctctgcgggacatccagggcatcaaggatgtggatgtttccctggagagtaagtcggcccaggtgaagcttgatcaggatgtgccggatgctgtgctgaaagctgctatcgaggacgctggctatcagctcgtcagtatccagtaacgggccgtttatgaaggccaagaaaggcgatattgttcacaagctaaaaatcgccagaggacagttagacggtatcctgcaaatggttgaggaaaatcgctattgcgtggatatttccaatcagcttcttgctacgcaggcgttattaaaaagcgccaatcagcagattttgcaagcccatatacgaagctgcgtccgggaggccctgcaaacggacgctgtaaatccaaaactggaagaagccctgaaattactggaaaaaatgatacagtaacaacgggagcgggaagggccttatgtcctttccgctcctaaattcgtttcagattggattgtaaatcctgcggttgggagcgtacaaagaagcccggtttttatatactttaagtggttagttagatatggttaatccagtgaggcgcgtcactggcgcgttttgctggataccttgtaattaaaatagaccaggaggaatagagtgatgaaacaggcacttgacacaagaacaaagctcttaacaaaaaatccctggccgctgatgattgaacttagcatccctgcggttcttggcatggtggtcgttgggctttataacatgatggattccatctttgtcggccagatggttggtgacgtgcagatgggagccatatcggtatcctatcctttaacccttatcaatgccggttcagcggcaatgctgggcgtgggttctgcatcggtactgtcccgcgctatcggtaagaaggacgagaacacaattaagaagatcatgggcaacttggttgcgatggttcttctgttgtccgtcatctacactgttgtgggtatggttttcacccgccagcttctgtccctgaccggagccagcgataacattctgaattacgctgagaaatatctgcgaatcgtattcgccggttctctgttcgtaaacttcttccagagcgccaacatggtcatccgtggagaaggccagctcaaaagggcaatgaccattattgccagcggcgctattttgaacattatccttgaccccatttttatcagcatcctcaacccctacggcatgggcattgaagcggctgcttatgcaacgattttttcccagtttgtccaggctgcgattaccctgtggtatttcaagaagaaaagcccccatgtgaagatcgggcgtatccgcattgatggtgagctgcttccccaggttctttctgtcggcatctctgctctgttaatgcagattctgaccctggtgcagcagacagtgatttatcgtgtggcatcgaactatggcggtgaaacctcccagctccttttagcggcggcgctccggttctggaatttctcttttgtacctctatggggtatcagccagggattccagcctgccgccggtacaaactacggtgcgaaagactatgaccgggtaaagacgctgaccagagttttcattatcgccgcaacgctgctgtcgctggtgttctatatccccgccgagctgttcccagaaaagattttgtccatgttcctgacaacgccgggtatcgccgcatcaggtgcgacaaacttccgtatcatgttcagcacctatatcctgcaaggcagctttatgatcgccgtgaccctgtttcagtctttgggtaaagcgaaaaaggccacctggcttgtgctgttccgtcagattattctctttatcccgctttgtgtggttctgccaatgatcggcggcatgggtattcgcggcgtgtggctggcgattgcgctgaccgatgcgattctggtggctattatcgcgttcatggtggcttatgagttccgcaaactgcctgcgacttcttccgtgaatcggtaaggaggatcgcttatgacgcttaaaaagttttttggttcagcggccattatttcaataatcggcgttgcactttggatatgcaaaaaattgaaaacttgccgtcaatgatctgtgcggaataaagacattgcagcaaatcaccccaacataaggccggtgcttttccatttggagagcatcggctttttctccgtttgcacagttgtcagggatgtaatataatctaatttgacttctgattggattgcaaatcctgccgattggagcgacataaaatgaggaaagactatataataaaagatgctaggagaatcctggcagaacaaatacgagataacggaaggaatactatgaacgaaaaccctattaccaacgctacggggttgtctgcggttattccaaaagataatgacggatactgtaccgtctataaattggactgtgcggatggcctgggccttatgacagtctatcaggtctaccctgggattcagcttatttacaatgatttcgaggcaacgaactgttattgggacggaaatattggcaagaacgtcctggagatcaatcattgccgggagggacgggaagggagcgtattgcaaagcggctcctgcctgtatctcggagaaggcgatctctccattcatacaatggataactgtgcgtctgaaatgtctttcccgttgaaacattaccgtgggatctcggtggtgcttgacctggaactggtttctgaaaatccgccgggaatcctcacggaaagcggtattgatactgcagatttcaaaaacaaattctgtgccgatggctcatgttttgtcatgcgggcaaaagacgatattgaacatatcttttctgaactttattccgtaccggatcgctttcaaaagccatacttcatgctgaaggtgcaggagttactcttgtttttgtgcatggtgaatgtaaagcaggaaaagcagcgggagttatatacttctccccaggtggagattgtgcgccaaattcataagcggctgatctctaatttgcatgagcggctgacgattgaggagctttccaaagaatatcatatcaatacagccacgctaaaagatacattcaagggggtctatggtcagcccattggaacctatatgaaaacgtatcgcatgaaacaggccgctgctctgcttcgccagacacaggcaaccatcgctgaaattgccaatcaggtcggatacgaaaatcagagtaagtttgcaacggcttttcgggatgtctttaagattgcaccggctgaataccggaaacagaatagtggcgactgattgcccaagaagaaatgcttatacctattgccataggttaaaataaaaccagcagaaacaagttccttcttgtcctgctggtttattcatatcttcgcacagaaagggatacctaagatggagcagttatcggcacgtctgctgttaacggctggcatcctgctgctgattgcaggggtgattttcgccattctccaagtatggctctataccggccttctctgggtgggtgcgtttggatgcctgatggcagctctgaactttctgaattccaaaaacgacggtggctaaagcacacggcatcgtagtgcacggtcaatgcggaaatgcgagctacacccgattttccatatcgagtgatatagatttggctttgggggaggattgtctattgtatgcaaaaaattgaagttgttgttcgcatcacgaaggatcactgcccaccgcaagagcagacgatttttgaatggttcgatttgatgcgaaatcccacagacgctctgagccgtcccgatctggaaatcaacttggaacaccaccgtgttttcaaacacggaacagaggtgtacatgagtcgttatgaatacggtgttttgagtttgatggcacagcatccgggcaaactgtttacaaaggagcagatctttgaagcagtctggcataaggacagcgaaagctatttgagagccgtcaccagcacgatcggtcgaatccgccagaaaatagaggatgacaaagatcacccccgttatattaaaacggtttccaacattggatatcaatttgtcccatcatcggaattggtgcgattgaatcgcaatctgtaataaaagccataccgtgagatcctagtaggatttttcggtatggcttttatcgttttctgtgctgtacaaaatcggcatccttgcatagatgaccaagaatattctaaaatagagataacttaattcaggaggtcgaaccatgcgaacgtttgaagaagtattgactcacttccatagctttttagagtctgcgacctatttggacgttgttccatgccgctggggatatgtaaggctttttaatgaaggcaatcccatcaatttcaatgcaattctttgccgtacaccacaagaactatatacggcattggaaaatgatttggaaacagagattcaggtcagcttgggaatcgactgaattggtataaaattggtttgcttttgggttcgttttggtatagtgactttgaaaaatatgctatactgtaccacaagcaaaacattttcaaggattttcaattttactgtaaaactctgtcagatgctttgccagtgtgcgggtcgagtccattaaggtttctcgcaccgcttctggacaggaaagatagattcgattgaactcttttaactctatttccgttttacccatccccggagtaatcagcgcatcaagcgaaaccggcaaaacacgagcaatcgccaaaagaatttcgtaagatggattcatgctgcctttttcaatgttggcgatatgcttcgttgaaacatggcagcgttcagcaagttgttcttgtgttaaacctgccagcttgcgctccgtgcgaaccttttctccaagtaccttcaagtcagaattcggcatcatcgttcacctcaatagtattgtatcgttctggtgaatgacgcggtataaccttgtatttcctgtgagtaggaagtatagtgccgatttttgcgtttcccggtcgagttataaaaaaacggtaactcgtccgggcgatttcatgcgccacaagatcacagttaccgtctatggagggtactgtgattttttattggggtaacgcatcaaaaaaagcctgtctgctgccgtaagccagaccgccccgaagcaagcacaatcgttccgttccaccatccacaatcgtgccgatgtgttatattgcgccagcttcccgccatgggaggctggcgtttttgcgcttttaagggcaaggtgtcgtgggccaccacgatcctttttgtccgaatgctcacattccgtaaaataactggaggattattgataatgaaatcgacctatttgcttccgtggctcaagatgaccacatggtacttccgactgtctcgattgctggaagtttccaacgtcaaaaagcgcaccaaaaatcatagtgctgatgccgaccgtattttcatgttggtgaaaaatcatgtgctggccgtatccggcataggagatgaagctccgcccactcccggcggaagaaacggagggagtgatgtattatgatcctgctgcaacgggtgaacgaatccaaaacctccgaagagaccgtgaagtgacacaagaacagcttgccatcgacctgaacatcagtgaccgctacatgagaaatctggagaagggtgagaaagttccgtctgtcgacctctttgtggagctgcgggagcgatttggctcctcgctggactacatcgtcttaggtgtgtctgcgtcccagcgggagcaggaactgcaagatcagctgcaaatgctccgcaaagaactgaaagaaatgcagcggcggattcttgttatgctggaaattctgggcgaatccgcttgattaaacgctttactgttgtaaaccggaacgattggttccggtgaaaatggcaaaaccggaactactggttcctaacgagaacttcagttttcaagtacactatggtcacagcaagggcagcccccctaacaggggacgacaaacccgaaactgtaccgtgtaccttgaaaattgaagaagcagcttttcggtacttccagacaatgatacttccgtaattcgcggcccggtcagaaagcagacggggtggctgagatgccaatggagcggtgcaaatccgccgccgaaaagttcccacctccggggtgtcgaggacaaataggagaaaaacagtatttttcaaaccaccagttgaggatttctcggctggtggttttacatttcccatcaaaataccgatatggaggaaatctatatgagtcgattttataacaactgcgtagacgaagccagcttgactaccctctgcccgatttgtctggattcctttcagggggcaaagggcgttcgcgtccggcgcgcagaccctaagcagaagatcaaggatgtctgcacctactgccagattcgctatggtttcgattattatgtacagcccgataagaacgctgggcagtatgtgaagcgaggccatttcgatgatgaatctgaatgcgcttaaaatcgacccggaatttcagggcaagatcccgcccctgaattttgaagaagaacaacagcttgagcagaacattctccacgaagggcggctgctgaatcccattatcatctggaatggctttattctggacgggcatacccgctaccgcatcctgcggaagcatccgttcattgtctaccagatacaggagatcgaactggccaaccgctacgcagctctctcatggatctgccagaaccagcttggacgcagaaatctcgacccggaacggaagaagtttctgatgggcaagctgtatgaatccgaaaagctggcacggggcggctccaaagagcgggcacacgatgagaacggacggttcacctcaatggttcaaaatgatccattgagggcaaagcagctctccacctgtgagcgcattgccgcacaaaacggcgttggggcggctaccgtaaagagagcagagaagtatgccaaaggcgtagacgctgcggaagatgcagtccccggtgcaagagaagaaatcctgaccgggcgcatcaaggcaacggatgcagaaatcaccgccttggcaaaaacgccaaaagcagaaatccctgcggctctcgcagaattgcggaagccaaagcaggaacgtcagcctcgaaaagccgaaacatcttcttcaaaacaaacgctttctgaaatcagcaaaagcatccaagggcatcaacgccagcttactaccgaagaaagaacctttctgaaagcatccattgacaaccgctatcaggaacgggtcgttgcaaacggctccctgatgatgtgcgaggtaaagggtgcaaaagaggacttcattcgccgctggaatagcattttcaaagaatacccggatgtttttgaagattcggactgccgcaagatcattcatgacttgaccgaagatgccgtacagtatcttctgaaaataaaggagaaaacgctatgatgctttctaacctgaacctttccagcctgccggagtgcaacttcgaggtgcggtacgttgacagcgttctgctgaacccctgcgccgaatatcagcggctgctccgcatgggcaaggttgcaaaaattgcagcaaacttttcggagtatatcgccaatgagccgaaggtcagctaccgggatggccgctacttcgtctttgatggtcagaacaccattgaggcacggaaaacgtgcaacggtgggcgtaacctcccgattcgctgcaaggtcttctacggcctttctaaagagcatgaagctctgctgtttgctgtgcagacaggcatttccagcgaactgaccgctggtgaacagcttcgtgccaaactggtggcacacgaagaaaacgcctgcgattttgtttcggtaacggaggacacaggtgtccgctttgcactggatgggattcgtaccccgtggaaaatctactgcatccgctcggcttactacatctacaagagctacggcacagccctttaccatgaaatgctgagtgttctcgtagatgcgtgggatggagattcggattccttcctgtcgggcatcctgcatggcatggctcgttttctggctctgtatcagggcgaatacagccgggaacggctgattctccggctgcgcacagttcatcccaagaccatcacccggctggcacaaaacgacactggcaatgtggcagaccgccacatgaaacagatcctgtccatctacaacggtgctggccgtacccataatttgccctgcaagcggtgatgagcatgattccagtcaaccgaaaatttctgcgcggtgatatttactacgccaatctggagccgcaccttggctccgagcagggcggtattcgccctgtggtcgtggtgcagaacaacaccgcaaactgctattcgcccaacctcattgttgcgcctgtcacatccaatactgcaaagaagcccgatcaccaagcccacgttcttgtggacggtaatcgggcttttttgcagccctctatgattttggcagaatctgtccagaccatcagcaagggacggctgatccgcccgatggggcggttgagcatcccggaactcattcggcttaattatgcgctgctgtatcagcttgatctgaacgaatgggtatggcgaaaggaggcctatgaacgctatctgcgataccaccgctaaatcggaaaccctttccgtcaaaggctgcaaagtcaagatcacctatgcgcctgcggatacagactgtctggatgccatccagaaactattgcagaccaccatcctgcgcacggcagggcacaccgctgcctgacatccttgtgctccttgaatgcgtgagataagataaaatcgaactgaaccttgaaaacaaaatatggacgaaacacgtttgatttttcctttctcactcaaagaaagagagattgaaatgaaaaaacgtgtctataccttataccgtgtttcgaccaaaggacaggtcgagaaagacgacatccccatgcagaaagaagcctgccgcaactttgcagaaagtcagggctgggagatcgtcaaggaattttccgaaaaaggcgtttccggctttaagaagtctgccaaagaccgtgatgaactccagaaaatccaacaggccgcaatggagggcaagtttgacatcctgctggtgttcatgtttgaccgtctcggtcgccgtgatgatgaaacgccctttatcgtggaatggttcacgaagcagggcatcgaggtctggagcgtgaacgaaggacagcagcgatttgacacccatgtggacaagctgatgaactacatccgctactggcaggcatccggcgaaagtctgaaaacctctgtccgtacccggacaaggctggaacagctcaccggggaaggccactatacaggcggcaccgtggcttttggctacaagcgtgtccgccttggtcgggtgaacaagaagaatcaggaagtctgcgaccttgtggttgacgaagcagaagctgagatcgtccggctgattttccacaagtacgtttacgagggctacggcgcacagaagttgagccactatctttatgaacagggagtcgtaggacggaacaacaaaaatatccccaacaccagcatcgttcggatgatcaagaacaaaggatacacgggatacctcatcaacggtgcggtggagacggagtgtccgcagctccgcatcatcgaaccagagctgttcgagcaggcacaggaactgcggcaggcacgcacctgtgagcgtggcggcacttcactgggcaccagttccaaagctctgttgaccgggctggtttactgcggtcactgcggcaaccgcctgagcctgaccagcagcggacggacacacacctacgccgatgggcatacggtgaaagaagtccggccccggtatagctgcttttataagattcggcatccgggtgactgcgatgggcagtccggctacggtgtttccaagctggattccattgtggaagaagttgtccggcagatcttcgcacagttccgggaggtttcccggaagaagctgctggaatcggtcaagaccaacgatgccgctcgcatccagaagaaggtcaagaaaatccagaaagacttggaaagcaagcagaaagaactggacgacctgaaagccgaaaccctcctcgtcatccggggcgtaagtgccttggacaaagaactgctcggcacactggtagccgaggcaagagagactttggaaactctggaaaagcagctcgtgcaggcacaggaagaatacgaagaagccaccaaaacggcaaagcgcagcaactacatctgcaacgagctgtttacatgggcggatgtgtacgacaccgccaaccacgatgaacgccgcgctatcttgcagcagttcattacggagattcgtgtccgaaaagactacgaaatctcgatcaccctgaacgccagcttcaaccaagtggaacagctcaaggctgtgtcaacctacgatggtgcggaaatttttgaagaaatttccgagaagggggcataaaagcgatgcgcttgcccgcagcactctgcaaaatgcaaagaaagaagcgtgaaaccgatggattttcaaaaagtacatggatgaccccgcccggttcgcatccgacttcagggttcggagcccggcacggtctgccaaagttttttaggcataaaaaacgccgcatcgtacaaaacgatgcggcaaattggtggacctagagggattcgaacccttgacctctcggatgcgaaccgaacgctctcccagctgagctataggcccatatttaggggcgtgactcggttgggcgaccaaccgacatactccccatttgaatgcccacaactctgtggggcacaaaagcgatacgcttgcactcccagctgagctataggcccatgatgatgacgctgatagtgtaccgcgttttagggcgtttgtcaagcagtttcggagagcatgagcggagacttacaaccggccaagctgccagaaggctacggcgctggcggcggctacgttgagggaatccaccccatgggacatggggatctttacggtgtaatcgcaggcggcgatggtgctgcctgccagcccatcgccctcggtgcccagcacgatggcaagctttggctcggcggcaagagcggggttgtcaatgctgaccgagcggtcgctcagcgccatggcagcggtcttgaagcccagcgcgtggagctgggcgctgccgttttccggccagtcggcagggcaggtgccgatctgcgcccacggcacctgaaacacggtgcccatgctcacccgcaccgcgcggcggcacagcgggtcgcagcaggagggggtgatgagcacggcatccatgttcagcgcagcagcgctgcggaagatagcgcccacgttggtggaatccacgatgccttccagcacagccacccggcgggcgtgagcacaaacctgctccaccgtgcggggcgcagggcggcggaaggcgcacagcacgccccgggtcagcgcaaagccggtaagctgtgccagcaactcccggtcggcggtgtacaccggcacatcgccgcagcgggtcaagatctcctgtgccgggccggtgatctgcctgcgctccatcagcagggaaaggggctgatatccggcgtccagcgcccgggcgatcaccttggggctttcggcgataaaaatgcccttttctggctccagccggttgcgcagctgcgcctgcgtgagccgggcgtagatgtccagttccggggcggtaaggtcggtgatctcgtaaatgacaggcatggaaacgctccttcaaaacagatttttccttattgtagcacaagccggggcagaatgcaaaatccctgctgcacacagagcacagcagggatttgaatgcagaaggaaaagcagccgcttactcagagcgcagcgccttgacggggttgctctttgcggcgctgcgggcggggatcaggccgcccagcatggtaagcagggtggccagaacgatcagaatcagcgcacccagcggcggcagagcggccaccacattggcgtttccggcaaggtggtggatcagcatattgccggggatcagcagcacaaggcagagcaccacgcccattacgccggagcacaggccgatgataaaggtctcggcgttgaacacctgcgagacattgtgtttggaagcaccgatggcacgcaggatgccgatctccttgcggcgttccagcacgctgatataggtgataatgccgatcatgatggaggacaccaccagcgaaatgcccacaaaggcaatgagcaggtggctgaccatgctgatgatctcggtgaccgaggtcatcagggcgcctaccatgtcggtgtaaaggatcaccttgtcctcttcgccctgctgccgcatggcggcgttgtaggcgtccagctcgtccacgatcagcgctttggtatcaaagctgttggggtagatataaatgcagtcgggcttggcgtagtctatatagccaatgctgctcagaacactgtcgtagctggaagcggaggagagcagggtgttcctgatcagatcggtaaggtcggagccggtcatgttgagctggatcgcgttctggaaggcagcagggtcgaccttgagggcgctttccacctgcccgctcagctgcgcaatgttgctctggatcgcctgtgcgatcttctgctccagctgtcctgccagctgctggatggcggggccgatctggctttgtacggcagcagtaagctgggtctgcaatgcctcgcccagctgggtggagtaggtctccatgacagcctgcatattctgctgcagcacatcggcaaactgctcctccagcccggagtcctccagcaggtccccgatggattccgacagcagcttctggaaggcttcagttttcatataggaggaaaagcccagcttgtccagattcagcagaccattgctgatgagatagcgcttgtagccgttcatgatctttttcatcagcttctgcagcgcatcctgcgaaaggtgcagctccacaccatcgaacagctcccgcatatccatgtccggcaggggcagttcgctcagatccagctggaagctggagggatcgatgagggtggaaaggtcaaaggagccatctgtcaggtcaaaggcaccgctcaagtcaaaatgcagggcactggtatcgaactgaaaagcatccttgagggcatccgtgtccaccgagaacagggaggcgatgtccagcacagtgccgccggcagcgccaaagggctcgccggtcagcacgttcgtgtccgggtcggccagctgctggcgcacgatggtgctgtcggcagcctgatcgatcacgtgataggtcagctcatgcagatagtccagcccggtgtacaggatggcagaggtggcatcggccttgggctgcacaacgcccacaacggtcagttcctcactgtcggccacgacctgctgcatataatcggcatcggcctgcttgttcagccagagcttgtgttcggcatcataggtgtagcagtcggctttgttgaccagccggaaggtcttgccgagaaactcttcgtaggtgtaggtgccataatcatcgggcagatcgaccagctggttgctggcgtactgctgcaggatcttatccagctctgcctgatcccgcattcccatggcgtatagggcatagtccgaaatgctgccgttggcgctcagcaccagcaccagctcattgtacttttccggccagcggccggcttttacgtcgtactgatcctcatatagggcaggggtctcggccatttcgccgaacacatggggactggataccgaggtgagcagactggataccgaggtgttctgaccggcaaggtcggtaaaggtggtgtccgggttcagcttatgcaccgtgccgtctgcgtcctgccggtagatcagcggggaagcgttgtaggtgtattccaccgtggcattatcccggatggaacaggcgtcgctgtccagataagccttcaaagagcgcaggtcattggtggcagcgccgatattcagctgtgccagcatctgccggaccgtcaccatgccctccggggcgggggcagagccaagcgcatcggcatgggtgctggggtccagcaggctggtcagatccatgccggagctgctgatctgcagcggataagaggccagcgtggaacgctccgtttcgctgatatagcggtttacaccgttggaaagcgaaaggatcagcgcaataccgatgatgccaatggaaccggcgaaggcggtgagcagggtgcgcgcctttttggtgagcaggttgttgaagctgagggaaagggaggtgagcagggacatggaagagtgccccatgttccggtgcacgggggctgcgcaaacagcatcgtcctcaggctcgtagggcatggagtcggagcagatgacgccgtccttcagcgttacgatgcgggtggcgtagcgctcggccagctccgggttgtgggtgaccatgaccaccagccggtcacgggccacctccttgagcagctccatcacctgaaggctggtctcgctgtccagtgcgccggtgggctcgtctgccagcaggatatcggggttgttcaccagcgcacgggcaatggctacccgctgcatctgcccgccggacatctcgctagggcgcttgtgcagctggttgcccagccccacctgctccaaagccttggcggcacggcggcggcgctcggccttggaaacgcccgagatggtcagtgccagctccacattgcccagcacggtctggtgggggatcaggttatagctctggaacacaaagccgatggtgtggttccggtaggagtcccagtcgcggtcggtatactttttggtggagatgccgttgatgataaggtcgccgctatcgtagcggtccagaccgccgatgatgttcagcagcgtggtcttgccggagccgctgggccccagaatggccacaaattcgttatcccgcaggttcagactgacgttgttcagtgcgtgctgcaccagctcgccggtcttgtattccttgttgatctgtttgagtttgagcatagatgtgcctttccggtaccgcgccgccgggcgctgagcctatggatcaaagtgggtgagagttacagacaatatataatctattatagcaaaatcttgtgaataaaccatgacaagataaagcaggaaggacaaagccggcgtttatctgcgtgtataggacaaaaaagagaaaacggaaaaagataccggttgaatttacggggcgaacgtgctattctaaaattgtcagcggcgcacggaacaaaacacggacacccattgcgccgcatgaaaaatgtgtcggaattgaaaaactgacgacacatttctgaaaagccgcataaaccagacatggacaaacatttctttaggattgtaacagcttctcctgctccatacaataaaaaaggacattcaaggcaaaaaagcaatgcccttgcggtaaggaggaactgaaatggaacgtacattttcacccatgatccggcagtattctgccattgatggcttgcagaaggcgtatacgctggtgtatgccatggaggtggagggcacacaaggctgccgactgaccttatgcaggctgggcagccgacagcgggtggacagtcagtatgttgcggctgcgccggaattctgctatcggatcctgcgctatctgtgcgagaatggagttcagccggagatctggcaggacgttgtcacagagctgacggctgtcgatccggcaggagggaaaggcggcgcttggtgtgaacagtgagcgaacagcccagctgcgggttgcccttgcaagctatgatctgaaggaactccgtgttcaaaagcgctatctgcaggaacagggaagcgccattgaatgtacctgcttttgcagcggggaaaagctgctgcagctgctgcagcagggtgcccgctgcgatgccgtggtgctgtgcagtgagctggcggatatgtctatggagcagtttgtccggcagctgtatcagctgaaggaaaggccggtgctgctggtgcagtgtgcaggccgacgcagagctgcggtgctgccggaaggctgcgaccgctgttactgcgtagaaggcactgagctgaaaaggctgctgtggcagctttaccgtatgccgggccagcaaaaccagcaattggagcagcagtgcggccagctgtacgagacatggggtatctcacgtgcagacatcaatgccagatacctcacctgtgcggtcagcattgtgtgcagcaccagccagaagctggcgatccgcaaggagatcctgcaggcggtgagcgagcagtttgaagcatcggtcactgcggtggacagcggcatccgccgcatggtggatcagctggaagcaaggccggggcctgcatggctggcgtttaaagccgatacggggctgggcagcggcaagcccaccaccggcaagctgatctatgcggtcagaagtgctgtgctccggcagaaaacagataaataagtggtgtcccgggaggcagagcaatgaagcagcaaaggacagacgcgcggtcacttacggcggatcagcaaaagcggatcgaggaggtctgctttcgctcgctggcgctgatcgggcacaactgtgaatatctggaacagcattttgaccgcaccggtgcagatgagtctacccggcaggcagtggcggatatcaacgccgctgctgtgaagctggaccgcaccctcagcgaagctatgactttgctggagtttctgcgcggggacgaaaagccgcagctgtatccggtcgatctgtgtgatctgctgcggcaggtggcggcgcaggctgatatgatccgggcgcagcttggggtggagatccatctggattacggcgggtggacctcctgctgtgcgctggcagaccgcagcgatgcagagctgctgtgtctgcatctgctctccaatgccctgcgtgccagccgggagggcggcagtgtcaatattgcgctgcgccgcacccagacggcatggctgctgacctttaccgatgatggctgcggcctgcccggcgaagatgcgcaggcggcgctggaaaaccgccgcagctttctgggcggggcacagttggggctgctgctctgtcaggagtgctgccgcaggatgggctggagcctgcagctggagcctgcgcctgaaaagggcaccagagcggtggtaagcattccgctgtatgcgggcgaaagccgtcccgacggcacagtggagctgcgcaccgacacggagaccgagcaggagcagcgccggtatcatctgcgcgctatgctggtgcgggagatgcgcaccatgccggagcgcggagacccggagaaggagctttaataatgtagaggggctgctgcacagcgttttgtgcggcagctttttttgagggaaaaaacgacacttgttcacaaaaagttcagccttttgagcgaaaaatactatttttttcgtgtaaaatagacaacatggattgaatgctgcccgcgattggattataataatagtgtatgcaaaaacgtatttactgcattttttatagcgaatgctgcttaaaaacagcgtagctgcgcgatgcgggctgctgaaaagagaaagctgccgttgcacacctttgctgcaaacggctgtttgccatggcagccggggcgttacgctccggttatttgtccttaggagggaaaacaaggtgagagtaggtcttgacatcggcagtaccaccatcaagtgtgtggtgctgggcgagcatgatgaactgctgtattctacatacgaacgacattatagtcatattctggaaaaggcgcaggagctgctgcggcgcattgatgccgagcagctgcatggctgcaaagcgctgctcagcatctccggttctgccggtatgggcttggcagacagctgcggcgtgccctttgtgcaggaggtgttctccacccgcgtggcggtcaagcgctttatgcctaagaccgactgcgtcatcgagctgggcggtgaggatgccaagatcctgtttctgaccaacggcaccgaggtgcgcatgaacggcagctgtgccggcggcaccggtgccttcatcgaccagatggccaccctgctgaagatgagcgccgatgagatgaacaaggctgccgaacaggcgcagcgcacctataccatcgcctcccgctgcggcgtgtttgccaaaagcgatgtgcagcccctgatcaatcagggtgcccgcaccgaggatatcgccgccagtatctataaggctgtggtcaaccagaccatcgccggtctggcacagggccgccccatcaagggcaacatcctttatctgggtggcccgctcaccttcagcaccgtgctgcgcaagagctttgacgaagcgctgaacgtgaccggcacctgcccggaaaacagcctgctgtatgtggcgctgggcgctgccctatatgccgataaggaatttgtgctcaccgaggtagccgctgcgctggacaagtacgccgccactgcaacctatgccagcgaaccgccgctgttcgccagcaaggaggagtacgagactttccatgcacggcatatgtcccacagtgtgccccgcgtggcttttagtgcccactgcgggccggtgcatatcggcatcgactccggctctaccaccgtcaagctggtggtggtggacgaaaagagccagatcctgtacaccaattatcagcccaacctcggcaacccgctgcccctcatccgggaacagctgctcaagatctataaggagcacccggggctgcaggtggcgagcgtcaccaccaccggctacggcgaggaactggtgaaaaacgccttccgctgtgattacggtctggtggaaacggtggcgcattttaccgctgccaagtactttatgccggacgtggatttcatcatcgacatcggcggacaggacatgaagtgctttaagatcgaggatggcgcgatcagcaacatcttcctgaacgaagcctgttcctctggctgcggcagctttttgcagacctttgcacaggcactgggctatgatgtcaaggagttcgccgcgctggggctgttcgcggaccgcccggtggacttgggcagccgctgcaccgtgttcatgaacagctcggtcaagcaggcacagaaggacggtgccagcatcgagaatatctccgcaggcctgtccatcagcgtggtcaagaacgcgctgtacaaggtgatccgcgcttccagcccggaagagctgggccgcaagatcgtggtgcagggcggtaccttctataatgaagccgtgctccgcgcctttgaaaaggagatgggcgtggaggtcatccggccggatatcgccggcttgatgggcgcttacggcgctgctttgtacggcctgcgccagagccataaaaataaccagaccacctctgccatgatggacgagcaggagctggaaagctttgcacagcaggtggtcagcgtcaagtgcggcggctgcggcaaccattgtcagctgaccgtcaacacctttgccgatggccgcaagttcatctccggcaaccgctgcgataagcccgttaccggcaaaagcgaggacaacagcctgaatctgtacgcctacaagcagcagctgctggccagctacaagcctgtgcccggcaagcgcggctccatcggcatcccgctgtgtctgggcttctacgagctgctgcccttctggtacgccttctggacgagccttggctttgcggtgcacaccagcccggtgtccacccgcgggctgtatctggctggacaggctaccatccccagtgataccgcctgcttcccggcaaagctgagccacggccacatcaaggcgctgagccagatgcagctggacgccatcttctacccctgcctgacctacaatgtggacgagggcttgggcgataaccactataactgcccggtggtggcctattacccggaggttctggcaggcaactgcccggagctggagggcaaaaagttcatctatgattatgtgggcatccatcgccccaaggactttgtgcacaagatggcaaaagaggtgctgcccaagtactttggcggcatctccgagcgggaagtgcaggccgcagccgatgctgcctacgcggagtacgaagcacacatggcaaagatccgagtaaagggcagcgagatcatcgacgaggcacgccgtcagggcaagcgcatcatcgtgctggcaggtcgtccctatcatgtggacccggaggtcaaccacggcatcgaccacctgatcacccgccacggggctgcggtggtcaccgaggacagcatctctaaccgagtgcagaagttccccaccagcgtgctgaaccagtggacctaccacagccgcctgtatgccgccgccaagtactgcaccacccagaaggatatggatctggtgcagctggtgtccttcggctgcggtgtggatgccattaccaccgatgagacccgcgagatcctgcagcggggcaacaagctgtatacccagctgaagatcgacgagatcacgaatctcggtgccgtgaacatccgtctgcgcagcctgtttgccgcactggacgagcgggacgaagccgccgcagaaaaggcagagtaaaaccgagatagcgcaaaaggaaagcatcctcgccctctcagtcatcgctgcgcgatgccagctcccccaaagtgggagcccttggcagtccacgcaaagtgtatctttttgccaaggcctctccctttgggagaggtggatgcgaccaacgggagcagacggagagggcgagccagctaaggacaaatacagcagtggtatgataattgtatcatgccaaaaggctttttaagaaagcaacataggaggaacctatggaatatcattatcctaaatttaccccggagatgaaaaagacccacaccatcctgatccccaacatggccgtgacccagttccggctcatggagtacgcactgcgctgcgagggctacaagtgtgaactgctgggcaactgcggcagtgccgtggcacagctggggctgaagtatgtgcataacgatacctgctacccggcgctgctggtcatcggccagtttctggatgcgctgaacagcggcaagtatgatctggagcacaccgccctgctgatcacccagaccggcggcggctgccgcgcctccaactacatccatctgctgcgcaaggcgctggtcaaggccggttacccgcagatcccggtggcaagcctgaacttttccggtctggaaaaggacagcggcttccagatgaccctcccgttggcacgcaagtgcatcgcctgcatcttctacggcgatatgctgtgtgcgctgcgcaatcaggtggccccttacgagaacgaaaagggtgccgccgaccgcatggtggatcgctggatcgcccgtttgggccgtgccttgctggccggaaaaggctttacttcccgggaaatgaagcacaccttcccgctgatcgcaaaggaatttgctactatcccggtcacccgggtgcccaaggtcaaggtgggcgttgtgggcgagatctacgtcaagtacagcccgctgggcaacaacgacctgcaaaaattcctggaaagtcaggactgcgaggtgaacttccccggtctgatgggctttgtgcagtactgcgccttcaacatgggcgaggatcatgtgctgtacggcggcaagctggctgtaaaggtaggcaccgaccagttcctcaactggttggacagtgtggaacgtgtcatgctcaaggcagagacggacgccgggttctatgcgccgggccccttcaaggagctggtggaaaagcccaagggggtcatctcgctgggcgcaaaaatgggcgaaggctggctgctgaccgccgagatgatcgagctggtgcagggcggctacggcaacatcgtgtgtgcgcagccctttggctgcctgcccaaccatatcgtgggcaagggcatggtgaacaagatccgtgcgctgtaccccagcgccaacatcacccccatcgactacgaccccagcgccacccgggtcaatcaggaaaaccgcatcaagctgatgctggctgtggcaaaggagcggctgaacgcccctgcagaagcccagccgcttacggcagagcagcttgccggcggcgctcctcaggtcggcgctaccgtgtaacaaaagcaaatacgataaaaacaggggagccgctgcacggcatttttacgcagcagctccctttttgcaggaaaggaaccgccatggaaaagcccgcagctgcctattatcatctgcccggcctgttcgagttttacgagttgtaccgccgttttttgccgctgtaccgggagcgccgggaatatttttacgactggtgcgccatcggctctatctacggcgcaccggcgggctgcatctggggcgggggacgcatctcctacggcggggcagctgcgcgcgaggtgctggcgctgctgcgggaatacggcatctccgggcggctgaccttcagtaactccctgctgcgggctgagcaccttgccgacccgcagtgcaacgccttgtgcgagcagtttgccaaggcgggcagtgtgccaaacggcgttatcgtccattcggatttgctggcggactatctgcggcagcgctggccggagctgtatctggtttcctccaccaccaaggtgctcaccgattttgcgcagctgcggcaggaactggaaaaaccgcagttccggtatgtagtgccggatttccggttaaacccggcactggaacagctgcgcaccctgccgccggagcaaaaagccaaggtggagtttttgtgcaacgagtgctgctggttcggctgcaccgagcgcaagcgctgctacgagacggtcagccgtcagaatctgggcgaggactgcccggaccaccgctgcgccgccccggatgccgccgggggctaccgcttttccaaggcgatgcgcagccccgggtttatcgggacggatgacatccggcagcggtacctgcccgcaggcttttcccagttcaagatagagggcagagggcttggcagcgcactggtactggaatttctgctctactacatgataaagccggaataccagctgcaggtgcgggagacaatttatctggacaatatgctggatcttttttaagaaaatcgcaccgggcagaccgttttctgtccggtgctgctttttgcctgcgggatttataccggaaaactttcttttccctccaaagcgtgttacaataaataagatattatttttagaagctgcttacgaaagcagcttcctgtaggagcagtgcatggaaacaacgcaaaaacagatcgtactgggcattctggcccatgtggactccggcaagaccaccctctccgaggccatgctctaccgcgccggagccatccgcaagctggggcgggtagaccacggagatgcctttctggataccgacagcttggaaaaagcacgcggcatcactatcttttccaagcaggcgctgcttacggcgggcaatactgccattactctgctggatacccccggccatgtggatttttccaccgagaccgagcgcaccttgcaggtgctggattacgccgtgctagtggttagcggaacggacggcgtgcagagccataccgaaacgctgtggcggctgctgcggcggtaccatgtgcccacctttgtatttgtgaataaaatggatttgcccggcatgacccgggaacagctgcttacccagctgaaccaccgccttggcgagggttttgtggattttggtgcagagcctgccgcccgcaacgaagcactggcgctgtgcgatgagcagctgatggagaaaatgctggatgcaggcaccctgaccgatgcagacattatccccgcagttgcccggcggcacgtttttccgtgctggttcggggcagcgctgcggctggacggggtggatgcacttctggatgggcttgaccgctgcacccgcgccgccccggcactgcacgcctttggcgcaagggtgttcaaggtatcgcaggatgagcagggcacccgcctgacatggctgcgggtcaccggcggggagctgaaggtaaaggcgcttcttaccggcgaagcggacggtgagccgtgggcagaaaaggcaaaccagctgcggctgtattccggcgcaaagtataccctgactgaggtcatcggcccgggacaggtgtgtgccgtgaccggcctgacccatgcaaagcccggcaccgggcttggggcagagcgggacagcgatgtgccggtgctggaaccggtgctcagctatcaggtgctgctgccggagggcgcagatgtgcacgccacgttgggtaagctgcaccggctggaggaggaagaaccccagctccatgtggtgtggaacgaaagcttgggcgagatccatgtgcagctgatgggtgaggtgcagctggaagtgctgcgcagcctgttggcggagcggttcgggctggaagtgtcctttggcccgggaggcattttgtataaagaaaccatcaccgagcccatggagggcgtagggcattacgagccgctgcgccactatgccgaggtgcatctgctgcttgaaccgctgccccggggcagcgggatgcagtttgccgccaactgccgggaagaggttctggacaaaaactggcagcggctggtgctgacccatctggaagaaaagcagcaccttggcgtgctgaccggcgcaccgctgaccgatgtgaaaatcaccctgctcaccggcaaggcacacctcaagcacactgagggcggagatttccggcaggctacctaccgtgccgtgcggcaggggctgatgctggcaaaaagccagctattagagccgtggtatgccttccggctggaagtgccggtggagaacattggccgcgccatgagtgatatccagcgcatggagggcagctttgacccgccggaaagcggcaccgacacggctaccctgaccggctttgcgccggtatctaccatgcgcagctaccccatggaagtggtcagctacacccggggcaggggacacctgagcctgacgctggacggctaccgcccctgccacaacgcgcagcaggtcattgcagagaccggctaccagccggagcatgatctggaaaaccccgcagattccgtgttctgcgcccatggtgccggttttgtggtgccgtggagcgaggtgcgcagccatatgcacgttgaaagcggctggggcaaggcgcagcctgcccgcccggaggtgcaggctgcgccccagcgccgcgctatggcctaccgcgccacgctggaagaggatgccgagctgctcaagatttttgagcgcacctacggccccatcaagcgggacccgctggcggctttccgtccggtgcaaaagaccgaacgcccggattttgccgccgaacagtgggaaattgccccggagtatctgctggtggatggctacaacatcatctttgcgtgggacgagctgaacgcactgtcaaaggaaagtctggacgccgcccgccatcggctgatggacatcctgtgcaactatcagggctaccagaagtgcgtgctcattctggtgttcgatgcctaccgcgtgcccggcagcccgggtgccatcgagcagtaccacaacatccatgtggtctataccaaggaggccgagaccgccgatatgttcatcgagcgggtcacccacgagatcggcaaaagccgccgcgtccgggtggcgacctcggatggcatggagcaggtcattatccttggtcacggcgcactgcgcgtgtccgcccggatgtttcacgaggaagtgcagaacgtggaaaagcagatccgcgcccttgtgcagggacaggcgtaaaggctgaccccaaaaatttcctctcttgtgaaaaagtcggtttggaaaatccgcagattttccaaaccgacaatcttaaaatatttattccgctagaaatgcccagcaacgacgacgaccgccgccagtggcggaaacagggaggagttgttggggcagcggccagcaagacgcaagtgctatccaaggcacgatgcggatgctgggtgccgcaacccgataagcggagggcattcaaatcgttctctggaggtgcacccatggctgtggaaattaccaaagaatttgtctggcagagcatcccgccccgtgcccgggacagccataagggtacctttggcagcgtgctggcggtggcgggcagtgccttttaccggggtgctgccctgctggcagccgagggcgcactgcgcaccggggcgggcatcgttacccttgccagcgtggaaccggtggtcagcgctgccgttacccgtctgccggagtgctgcctgtgcccctgtaaggagggcgcacagggcggcattgcgccggaaaatgtgccgctgctccggcggcagaaggccaccgtgctgctgctgggccccggccttggcggcacagcgcaaagcgctgcccgggccgccgagacccgcacgctggtgcagcagcttctgcccggctttgccggggctgcggtgctggacgcggacggtctgaacgccgccgcgcagctgctggcagagggcaaacccttcccacacccggcgggggagctggtagtcaccccgcaccccggcgagatggcgcgcctgaccgggctttcggcagcagagtttgccgccgaccgggagggcatcgccctgcactatgccaaggcgtggaacgccgtggtggtgctcaaaggggcacgcactgtagtggcaagcccggacgggcgggtgtgcgtgaaccctaccggcaacccggggcttgcccggggcggcagcggggatgtgctggcggggatgctggcggcgctgctggcctgcggtctgcccgcttacgaagccgctacctgtgcggtatacctgcacggtgccgccgccgaccgtgccgccgcaaagcgcggcgagtacgggatgctgccgcacgatatcctgccggagctgggcgcactgtttgcggaaagccagagataaacgagaaaagcggcagctgcacaaaacaccgtgcagctgccgctttttgggggtgaaacgatttggaatgccctccgcttgcgctctgggcatattcagcggaatgattattataaaaagtggttcagaaacgtctgcggacgtttctgaaccactttttcacgctagggggcgtgatgggaaacggttgcgctgtaatagaaccatgcagattcaacccggtgaaaatggaatgcagaatgtccgccggatttagcggaactggctgagatattcctccaccgagcgggtcatctccttggaaaaatcggagttatacttgcggttgcaaaaggcggtgcaccactgctcaaagggcgcgttgccagccttgtagccaaaggcgtcccgcagctccgcgccgtccatggtgcggtagccgttttcgtgcacgatgtgctccatggcgcagcgctggggctttacgcggtctttctgctgctgggtgggccagccgaacaccaacatcaccgccgggaacacataatccggcaggtgcagcagactgcgctgggtttcgcagttctccatgatatccccgatgtagcacgagccgatgccaaagctttcggcggcgaccacggcgttttgtgcggcaatggcggcgtccgtgactgccagcatcagatcacccacacccggggtgcggggcgtgcagccaacttctaagtaggcgtcgtaccactttttgcagtcggcgcagaacaccagcaccagcggtgctttggcaataaagggctgatggtcgcagctttcagccagcgcttctttcagcgccgggtcggtgatgtctaaaatggtgtacagctgctgacagcctgcagagggtgcctgtgcggcagcttctaaaatggcctgcttcatctcggcagaaatgggcttttcttcatacacccgcaccgacttgcggtcgaacaggctttgcaggatagggttgcgctcggtcatgggaacacctccgtgttgtgtttattcatagtcgatgggcagggtgggcaggccgttcagttccagcccggcggtgtgcccggcaatgtactggtagtagccctgtgccgcgatcatcgcgccgttgtcgccgcagaacttcagttccggcaggtagacctttgcacccagcttctgggcaccgtcattcaccagctgacgcagacggccgttggcagctacgccgccggcaagacacacctgctttgccccggtatcggcagcggcaagcagcagtttttcggccagaatgcccgcaatgcgctcctgaaagctggcagcaaggtcgggtacgttcacttcctcgcccttcatctgcgccttgttcacctcgttgagtacggcggtctttaaaccggaaaagctcacgttatatttgccctccacatggggcaccggcagacggtaggccttggggtcgccggtcttggcggcagcggctacgctggggccgccggggtagggcagacccagcgtgcgggctaccttgtcaaaggcttcgcccgcagcatcgtctacggtatgacccagaatgtggtagtgggtgtagtcctgcacttctacgatatgactgtgcccgccggaagccaccagacacaaaaagggcggcttgagctccgggtgggtcaggtagagcgcagcgatgtgtccccgcagatggtgcaccggcaccagcggcttgcccgccgagtaggccagccctttggcaaaatttacgcccaccagcaccgcgccgataagccccggcgcaaaggtgacggccacggcgtccacatcgtctatggtcttgccggcgtccagcagggcttttttgaccgtagcactgataaattcgcagtggcggcggctggcgatctccggcacaacgccgccgtacagcgcctgttccttgacgctggtggagatgacgttgctcagcagatgccgcccgtcctccaccagtgcagcggcggtctcatcacaggtagactcgattccgagaatgatcattttagtgtgcctccagccagtttttgcctgcgtgcacatcggtgctcaggggcaccgcgtactgcacacagccttccatttcctcccgcaggatgcgggtggcctgctcagcctccgtctccggggactccacgatcagttcatcgtggacggtcaaaatcaggcggctggccattttttcgtcccgcaggcgcttccacacccgcaccatggccagcttgatcacgtccgcagcggtgccctgaatgggggtgttgcgtgccatgcgctcgccgctggcgcgtacgttgaagttggtgctggccaactccggcagggtgcggcggcggccgaacagggtggacacatagccgtttgccttggcatccgcgatggtcttgtccatatagccgctcacgctggggaaggcagccagatagttcttgaggaaggcgtctgcctccttcacggtcacgccgatatccttggaaaggctgtatgcgcccttgccgtacatgatgccaaagttgatggccttggcagaggagcgcagccggggcgttacctcgctctgcgggatgccgtagatcttggcggcggtgctgcggtggatatcctcaccgttcaaaaaggcctgctgcatatgtgcgtccccggtgatatgcgccagaatgcgcagttcgatctggctgtaatccgcgtccaccagcacgcagcccggctttgcaacaaagtaggcgcgcagctggctgcccagctcggtgcggatggggatgttctgcaggttggggttatcggaggagagccgtccggtgcgggcttcggtctggttgaaggtggagtggatgcgcccgtcctcgccaatgaccttgagcagaccctccacataggtggagttcagcttctggtaggcgcggtactgcaaaacgtcctccaccagcgggtactcgcgcaggctttccagcgtttcggcatcggtagaccagccgcgctgggtctttttgccgtggggcagacccatggtgtcgaacagcatctcacccagctgtttggggctgttgggattgaaggtggagctgccggtctccatgtggatgcgggtcagtacctgctccagctcctcccgcagctttacaccgaactgctcgatgccgtccttatccaccagcacgccggtgcgggtcatgtcggccagaacctgtgccagcgggaactcgatctcgttgtacagtgcatcctcgccgcaggcggtgatctcggccttcatccgggcaaacaggtcggccagccgcccggcgtccgggtaatcggtgcaggtaaaggcggcagcggccttgtaggcggggatcagttcgctgatctggtacttggaggcagaggcgtccagcagataggcagccagcttgccgtcccagacgatgctgctgccccagccgccggcagccatggctttggcgtagaggggcgcggagttgaacacatccagcgtcacatcggcgttgtccagcagccgcagcaggtcggcgtcctccagcggatagacggtggtgtcctgcacggcataccagctttccggctgcaataccacgttgcgggtgccctgcttgccggtaacggcggggcgggcagccaccagataatgtccggcgggggtcaggggcaggggagcaagttcggcttccggcagctccacagcctgctcctcggcggcagcttccggcgctacgccgtccagcccgaaccgcgggatcagggagtgaatctccaattcctgcaaaagccgcacggcggcgggtttgttgccctcgcccacggtgtaggacccctcggcggtgtcgatgggggcgtcggtacggatagtgcccagtgtgtggctcagctcggccatggacttgtcctctaacaagtgctcccgctgcttgggcttgatgcgcttgtcgtcaatgttctggtacacgccctgcagcgagccgaaagtctgcaccagcgagagggcagtcttttcgccgatgcccttcacgccggggatgttatccgaggtatcgcccatcaggctcttcacctcaataagctgcttaggcgcaaggccgtatttttcctgaatggcgtcctcgtccatcaccacggtcttgctgcgccccatcacggtggcagcaagcagcacggtggtgctctcgcttaccagctgcaggctgtcccggtctccggtagcaaggaagcagtcgtccttgcgggcggcgcaggcagcagccagtgtgcccagaatatcgtccgcttcccagccctcggcggtaacggtgcggtagccaaggtctgccagcagctgcttgagcaccggaatctgctgcgccagttcctcgggcatggcgtggcgggtggccttgtagccatcgtacattttatgccggaaggtgggggctttcaggtcaaaagccacggccacctcgtccggctggcactccttgagcagggagagcagaatgttcaaaaagccatagatggcgttggtgtaacgtccgtccttggtggtcagcagcttgatgccgtaaaaagcgcggttggcaatgctgttgccgtcaatgaccagtaaacgcataatgcagttcctccgttgcgtaatttcacatcttatagtatagcacaaaaccgcaccgcgcgggagctttttgcgcaaaaaagagaaacggctgcttttcgtgatgtcatctctcgtaaaaatgcgattgtcgcggctcgtaagccgtgacgatcgtatcatttataatgttcttccgctgcctatgcccagagcagcgcggagggcattttaaatcgtcccgccgcaaaaaaagctgccgcacaagctgtgcagcagccttagcgatgccgggcttattcctcaatgcggatggcgcttaccgggcagctatgggctgcggtgacggcctgcggcacctcctccggcgggatggggccgggctctgccacagccagaaccccctccatgcggaacacggcggggcacagcccggcgcactgggtacagccgatgcacagctcagggtctacgaatgcattcatgcaaacacctcctttgcggaaagcattgcccgttttgccgcaaattatgcctatgcaagcggtttgcggtgtggtacaataagaccgccgggaaccggcaggaggagataagatgaatatccagatctttggcacgagcaagtgctttgataccaaaaaggcgcagcgctatttcaaggagcgcggcattaagttccagatgatcgacctgaaggaaaagggcatgagccggggcgagtttgataacgtggcgcgtgccttgggcggctgggaaaagctggttgacccggcggcaaaggacaagcagacccttgcgctgctggacgcgctggtggactggcagaaggaggacaagctgtttgaaaaccagcagctgttcaagacccccatcgtgcgcaacggacgcaaggccaccgtgggctaccagcccgagatatggaaggactgggaataaaaagcctgctttcacaaaaaaaccaccggtacaggttttgcactctgcggccggatgtggtatactgttgggtagacaaaaaactttgggagactcagaccaatgaaaaatacgatcaccccggaagaacacgcccggatcaagcgccgccgctggcggcagaccttgggtctgctgatcacggtgctggtgcttatcgggtttatcacggtgctgcgggccggtgtgggccttgtggcaaacctctttgacgataccgcacaaaaacaggaatacgaggacaagctggagggtctggtattgttcgaccccatgccctttgacggcattgagaacatcgacgacctgaccctgcgggaagcagccgtatggggctgtgtgtacagcattcaggagacacagggcggttttgacaactataacaccgaccccgagaccgagcagctgctgctgccctcggtggaagtggatgcctatctggcaaagctgctgggccccggctttaagctgacccaccgcagctttgacatggaggatatgacgatcgagtttgacgagaccacccagtgctacaagatccccatcaccggtacggtgggctactaccgcgccaccgtggtcaagctgttcaagcgcagcggcaagctgcacgtcaccgtgggctatatccccaccgccagcgcggacgacagcatcatcaacccctcctcggacacccccaccaagtatatggattacctgttcgagcgccagagcggcagctggtatctgaccggcctgaccgagagcgagacgaagcccgaaagcgccgcaagctccgctgctgcgcagccggagcctatggcggaaagcgatgtgcaggacgccattctggccactgccggagattccgctgcggcagattcggctgctgcttcggctgtccagccggaagcgcaggcagaagcgggtgcagacagcgccgtggcagaagcccccgccgctgaggatgccgccagtaccgcagcgtaaaatgtaaatgaaaacacccgactgtgagtttgctttcacagtcgggtgttttttgtacgttttattttaaatcaaaccgtaccaccaccagccgataccacaggtagggaaccatgttccagatcatccacagctccatcaggatataattgggcaggtctttcaggcggaaggggcgcttgcccagcttgcccgctttgagcagggcaaaggcttcgtgcattcctttgtcccaagccacgccaaagccctgcttgtggaacttgtagcacttgagcagatagcccagcgccagcgggataaagttgagcaccagcatcagcagcggctcgtttttgagcggcagcagaatgctgttgcggccgctctgctggcttttaaaggcgttgtatttgacagcgccggtgctggcaccgcagatatggtagcacttggcggcggggcagagcacgtttttgtagccggcattgttggcgcgccagctcaggtctacgtcctcaaagtaggcaaaaaagttttcgtcaaagccgccgatctcgtccagaatgcttttgcggtacagcgctgcgccgccgcaggccgagaagatacgcttttgctttgtgtagcggctgacgcggcggccatcgccggtcttgcaggcaaagcccatccatgttacatagtccccggcatcatcggccagctcccgctcaaagtgacggatcatcaaactttgcaccgcaaaaattttggggtcggcatcggcggcgcgcaaaagctcggccagccactgcggctcggcaaaggcgtcattgttgaacagcaccacatatttgctctgcgcccgggcaatgccctgattcactgcgtaggaaaagccggtattgcgtccgttttcgatcagggtaaagttggggcgggtgcagtagctgcgggcttgttccagactttcatcggtggaaccgttgtccaccacgatcaggtcaaaatcctgctcggtctgggcgtagatggactcgatggagtccttcagccagcccttgccgttgatattggggataacgatggttgctttgctcataagtttttctcctgcggatgtacagatccaaggggtattatagcataaccccccgcaaaaagaaacgggcaaatgctgcgcacggggaagcttgcccttcgctcagcagaagcggatgcggtactcccggggggtgcagtgcttgatctcccggaaggtcttgataaagtagcttgcgtccgaaaaaccgcattccagccccacctcgccggtcttgagccgggtggagcgcagcagctcggcggctttttccacccggaactgcttgacgtactggatgggcgtgatgcccagaaactgccggaaactgcgcagacaggcactttcgctcagggctacgcatccggccagcttttccacagtcagttcctcggcgtagtgctcctctacatagcgcagcatctgcttcatccgctccgaggcgatctgttcctgctccgataccttcaccttgccgctgacgcattgggtaatgagcagccgcagggcggcggtaaggtggtaccgcacccggttctcgtagtcaaagggctcgtccgccacgcccttccacgcctcccgcaggcagagcagcacctgccgctgccatggcacggcctcgtccagcaaaaagaagggcggcgtgcccggctgcaaaagcgggcggatgagtttttgccagaacacggtgtccatgccgccgacaagcctgggctgaaatacaccggagtgcagcagcgccctgccctcagcaggctctaccgcgtgcagcgccccggagttgataaacacgccctgcccggtctgcagggtcaggcgggtcttgttcacatccacatgaatgggccccagcgccgccagaataaactcgaattcctcgtgccagtgccacgccaccgagtagcaggaaagatcctcggcgtagcaggcgatagggaacagcgggctgccgtgctgggtctgctcccgcccggcggcatcggccaccacggcagtagcactggaaagccccacccggccgctggtataagaggcacagcttgtctgatatgccatattcaccaattcctttccgcaatactttgaatgttttttatcaatgccgattttgttgcatatactatgcggttttgttctatgattcaagattgttttgtggtattatcctatcagagcttccaagctcagtatagcaccaaggcagcgggaacgcaagctgtgcaagcattcccatgccgggcaaaaccgctatcctcccgccgtctgacggagttacagccggacggcaagtgtaatataaaccattttatcaaggaggtattcctatgcttcgtatcgagtattttgataaggaacgtttcatgcgccagctttctgccagccacggcagcgtgctgctgcatctggacaacggcaagacctgcgacctgaagcaggacgctaccgcacgctccatgctgcagatgatggacactgcccccaaaaagggctttgacctcaccgtgaccgaccccgccgatgtgaccggcttcctgcgctatatgctggaggcaggccgaaccgagcgcgtggccggctgagtaatgccaatctcttatcccaataagtgtcacagctaatgcaaagcgcccgctccggtcaaagccggggcgggcgctttgcctgttttaccggaaagcttgcgcaagcgggcggtctgtggtaagctgaaagtaaaaaaacaagatggagggaacgactatgaacctgaaggaagcattccgctaccagaacaagctccagtccttgctggacgaggcgcagggcattctggattgcgatgccaacgtgaccaaggtggccaacacctatctgcgccataaggtgatgcccgaggctgaggacgagaccgttatggacgtagcacagaccgaatatgcggagcagatcaccgacattgcccggttcatgctctacctgctggaggagaagagccgcctgtttgccgccatccgcaaggcaaaggatgcgctggacatggatatggacagcgaggtcagcctgaatgccgcgcgccagagcattgcccgcaccttcaagcggatgaacgacctgcgcagctccgagcagctgctttccggtgggggcaccggctaccgcttcaacgccgagggcaaccagatctcctactgctgtgatgtgaagcgggtgaccaccatcaactacgaccgcaaggtcatccatgccgcgctgagcaaactgaaccggcaggcagacgagacctccaaccggctggacctctgccttgtgacctccaaggtggactacaccgtcccctttgatgtgaacgccagctttgccgaggcctttgagacctatctggaaaacgcaaaaagctaaacaacgctccaccggctattttgggtgcggcaagtgccgggtgcacggctgccggttcaggtgcagatgaactataacgctgcacatttccgcaaggaagcttcggtacggctcaccttacgagccagctattatgaaaaaatcttgcgttcggcttttccgccaccgccagacgctttttcgccgaaaccgtcccttgctccttcccgcattcctgcttttgtgcttacgtctccatgggcaggcaggcaagccacccttcatgaatttgcccgcagactgctgcgggcacacactttctgcgtgccgggtgggcgctctgcgcccctttgcacgcggagtaaaatggcagccgcccctgcgcttgccgtatccaaaatagccggtgaaaaaaccaaaaccgaagggacgtactatgaaaaagtgcaatctgttttatctcatcgggctgctgttttttcttgctgcggcactgaactttgttaccggaggggatcacgctacggcagtggtatggcgctgccttggcgctacctttttgctgctagggtgttcgcagcagaaaaaataaagcagcaggccagccccggcgggaaaagctgccggggctgcaattctttgcggggctcgttcgtattccagacagaacgaccaaatttcgacaaaaacgaggtatgatcatgtcaaccaaaacgatctattccactgccgcgacccgctttgacctgagcgctgcggcacttcatatccttgctatggcgctgatgctgatggaccacctgtgggcgaccctgctgcctgcgcaggaatggctgacctgcgcggggcgggtggcgtttcccatctttgcctttatggcggtggagggctacttccacacccacgacctgaaaaaatacaccttgcgtctgctgctgtttgccctgctttcagagatccccttcgacctgatgtacggcggcacatggttctacccggtgcaccagaatgtcatctggacgctgcttttgggcattctgggcgtccatttgatggaaaccgtgcgcaaaaagcagaaaacatggatgtacctgctggtatccgcccttgtggtggcggcaggcgcagtgctgggcacgctgggcatggtggactactacggcgccggtgtgctgaccgtgttcatcttttacttcttccatgggcgcaagtggtggtgcctgctggggcagctggctgcactgtactgggtcaacgtggaactgctgggcgggcttatgtaccccatccagctcttcggtatggactttgagctctgccagcaggggctggcgctgctggcactggtgcctatctggctgtaccgcgggcggcagggctaccacagcaagccgttccagtatgcctgctacgccttttaccctgtgcatatgctgctgttggttctggtgctgaacttcgtgaaccgataagatattaggaaacgggtcagaaacacccacaggtgtttctgacccgttttttagtcttttgccgggggtgctttcctataaacgcaaagcatggtatactgaaggcggaaaacaaaagcttggaggagcaacaatgacaaacaagaagctgaactaccccgcaatcgccaaggagacggccatcctgaccggagctatcgctatcattgcggcggcggtctatttttttctggcgcccagccatacatccgtcagcagtatttccggccttggcatcgtgctttctaattttgtgccgctgccgctttcggccattactatggtgctgaataccgtgctgctcatcatcggttttttcacctgcggcagggagtttggcgcaaaaaccgtgtataccagcgtgatgctgccggtatttctggggctttttgagcggctgttcccggattttggctccatgacaggcagtcaggagctggatgtgctgtgttatattctggtggtcagcgtgggtctgagtattctgttcaaccgcaacgcatcctcaggcgggctggatatcgtggcaaagatcatgaacaagtacctgcacatggagctgggcaaggccatgtccctttcgggaatgtgcgtggcgctttctgccgcccttgtctacgataaaaagaccgttgtcctgagcattcttggtacctatttcaacggcatggtgctggatcatttcatcttcgacaacagcatcaagcgccgggtgtgcatcattaccgagaaggaagaggcgctgcggcagttcatcatcaacgacctgcacagcggtgccaccatgtacgaggctatcggtgcatacaactttgaaaagcacaacgagatcattaccatcgtggacaaaaacgagtatcagaagctgatgaacttcatcaaccgcgaggacccaaaggccttcgtgaccatttataatgtgtccagtatgcggtatcagcccaagcgctgagcgacgcagggaaaggatgcaaaagccgtgaccggggctttcccacagcggaaaaccgtggtaaaataagaaaaaacggaaagggaacaacagccatggacatcagactggtttgcagcgatattgacggtacgctgctgcaatatggcaaaaaagaactggagggcgagatctttgaccagatccgcgcgctgcatcagcggggcatctggttctgcccggcctccgggcggcagtataccagcctgcgcaaactctttgcaccggtggcagactgctgcgtgtttatctgtgaaaacggcggcactatttttcaggaagaacagtgcatcgctaaaaaccctatgccccgggcgctggcagaggaaattgccaacgatatgtggacgcgcagcgaggggcggggcgaggtgatgctctccggccagaacactgcctacttgatggagcgcggccttgggatgctgcagcgggtgcagtttgtgggcaaccactaccagatcatccacagccccgccgaggtgccggaggacatcaccaaggtgtcggtgtacctgcacgagggcgtggagaactatgtggagcgctttgtgccccgctggaagcaggcaaactgcgccgtggcgggcccgttctggatcgataccacctttgccaacaagggcatcggggtgcagtgcgtgtgcagcacccttggcatcgaccccgcacaggtcatggcctttggcgataactacaacgacgagaccatgctggacgtggtgggcgtgccttacatcatggacaacgccgccgccccgctgcgggcaaaatacaaaaaccacaccccccgcccggaggatgtgctggcgcagctgctggcacagcagccgtaaagggggagaacccatggaccgcaagggcttggaacagctcatttttgatacttacagcgtagagccagactatccgtggatggacaccccggagtcggcggtgttccgtcatgcggcaaaccgcaagtggtttgcgctggtcaccaccgtgcccagaagcaagctgggtctgcccggacagcagccggtggatatcgtgaacctgaaatgtgaccccatcctcatcggttctctgcgggcagagccgggcttttacccggcctaccacatgaataaggaaaattggatcaccgccgcgctggacggcagcgccccggaggataagctccgtctggtgctggatatgagctacaccgccaccgcacccaagctgcgaaaaaggaaagcttgaccgcagcaaaataagggcgggcgctgcaattgctgcccgccctcattcgtattcagggtaaagggactagagggactgcattttgcaaaaggaggaagctatggctatttttgaaaagaccatccgcaaccagaactttgataccctgctccgcaagctggaacacgccatcccggacagcagctggtcggcagagctggaagccggcagcgactttaaggacggcagcgcccggtgcagcgtgcgggtgtttgagcggtacagcatggtgggcggtaaccgtcttagcctgacgttgaccctgttccagaacggggacgagcccatccggctgtcggccattgcagcgggcggcagtcaggcggtgttctttaaaatgaacaccctcggtgaggacacttttctggaggacgtaaagcagctgctggaagaaatattggagggctaatatgttttatactgggtttgacgcgctgttcagcatcctgttcccgctggtgtttctggtggtgctgggcatgatcctgtttactatagtgggcaatctgcgcacatggagcaaaaataatgcgtccccacgccttaccgtcccggctactgtggtggccaagcggacgaacgtttcccgccatcatacggacaatacgatgtcgcatacgttcactacctattatgccacctttcaggtggaaagcggtgaccgcatggaactggaagtagatggttcggattacggaatgcttgtcgagggcgacaccggaaagctgagctttcagggcacgcggtatctggggtttgaacggaaagacgggtgaccgatatgcagcaaaagcattcaagtgtgccggaaatcgtgggcagaagcctgttttatacactgacgaactatctgcttatcagcatggaactgtccttccgtgcgcagtggttctcggtcttgttctcggcggcgcttgtatggtgcaacatggagtattggaacgccgtttacaggctgaccggcaaaaagcttgccgcatgggtcttgtggggcgtctgcattgctgtaagcacaggcgttgcgtattttgcggggtatatccaagggatgcttgttccgcttgcggtatgataaacgcgctgctgcgcagtatttttgataaaatcgcagaagctgtgacaaaagtattattcttttatgaattttagcactctacacttgacagtgctaaaaaatcgtgttataacagtggcgtgctcaggaggaagggcaaaaggagagccgcaaggctccccgaaaagccctttgcaaagagcttcaaaatgtaattttatacccgacccgaacgccgggattggaggtatgttttatgtttatgccgactgtttttcatgagaacctgttcgatgatctctttgatccgttctggaacgagggtgcactggagcgtgtgatgaaccgcgaagcccgcgacacctttggtaagcgcggcgcaaacatgatgaagaccgatgtcaagcagacggacaacggctacgaagtggacgttgatctgccgggctgcaagaaggaggacgttcagatggatctgaacgacggctacctgaccattcaggcagtgcgcagccactctaacgatgaaaaggacaacaagggccgttatgtgcggcgcgagaccttctccggcagctgcgcccgcagcttttatgtgggcgaagtgaagaaggaggatatccacgcaaagttcgaggatggcgtcctgcacatccagctgcccgctcctcagcagacgaaggctctgcctgagaacccgaatctgatcgagatcgagtaaatgccgaccgtgtgcgccaaggcataacgtatatagggatgcccccggagagctgcaacaagccctccgggggcattttttgtgtgcaggctttcgatgacggagaggggagaaagtacctgtttttgccagaaaactttatttttccaccgtttcgtggtatccttataaggcgcacgcaatacaggcctgcggctgcactggcagcggctgcggactgcgtgcggcaaaaaagaacgtatagaagtaaaaaagggggataaaagtcatgggcgaatttgcctttcagactttacgggaaagtatcacctctgccatcaggagcaagatccttaccggggaattacagccgggcgtaaagctggccgagcagcggcttgccgaggagttcggctccagccgggcacccatccgggaagcgctgcggcagctggaacaggagggcatggtcgagtattcgcgcaatgtgggctgctctgtgcgccgggtgaaaccggaggacgcctacgagatctacctgctgcgggcaaatctggaaatgacggcgctgcgctattttgactgcaaattcccggaggaggatctgcgcaccctgcgcggcatcttagaggagatgcgcaatgtccggcagggggatctttcgcagatcgtggagaatgataaccgcttccatgcggtcatcgtgcagcgggcagggctgcccagactgctgaaattctgggacgacctgaactacggcaacttgctcgttggggcgagcagcggctctaaccacgaggttttggcacagcggcagaacggcatccacaccaagctgtacgaggtactggcaagcggcgacaccgaggctgcctgccgcgccgtctatgcccactacatggagcctatggagcggatgcgcagcgcaaacagcgctggacaggcagcagacggcacggcaaaataaggggaatttggctgaacgtctaaattttgaccaatcattttatggaaattgcagattgtctacaatctgcaattatgctatactgtcaaagtgactggtcgagagttgctgtatttttggtaaaaattgcaaaatgtatgcggaacctcggccttcttacaggaacttccgccctgtgtggagaagaaagagaggaattatccgtatgtctaacaaagaaaaagccacaaagatctcgtggcttacccttgccttcatggccttttctacggtctggggcttcggcaacattaccaacggctttgtgtactttaacggtccgcaggtcatcttcagctggatcttcatgtttgccctttactttatcccctatgcgctgatggtgggcgagctgggctccgcctttaaaaacgagggcggcggtgtcagctcctggctgcaccagaccaccaacgccaagctggcttactacgccggctggacctactgggcgtgccacatcacctacatcgccagcaagggcagcggctttttgaaggcgctgagctgggcggttttccgcaacgcggagacctacgattccttccccacccgctacatccagctggctaccttctgcatcctgctgctgggctgctacattgcaagcctgggtctgaaccccctgaaaaagctgctgactgccgcaggcacctgcaccttcgtcatgtccctgctgtacatcgtgatgatgtttgctgccccggccatcaaccctacggcagagtacgtccacgccaacctgagcttcagcagcatgatccccaactttaacgtcacctacttcacgtccctgtccattctggtgttcgccgtgggcggctgcgaaaagatctctccctacgtcaataaggtcgagaaccccagcaagggcttcccccgcggcatgatcacgctggccgtcatggtggtcgcctgcgccattctgggcacgctggccatgagccgtatgttcgaccccgccgtcatcaacgccagcgcagagagcttcaacgcctatgtcgccaacagttcttactgggctttccagaagctgggtcagtactaccatgtgggcgatctgttcatgatcatctacgcgctgtgcaacgtcatcagccagctcgccgtgctgatcttgagcatcgacgcaccgctgcgtatgctgctggataacgagcacaccaagcagttcatcccgcaggctctgcacaaggtcaacgcccacggcgtgcacagcaacggcatcaagatggtggctgtgctgtccggctccatcattctggcacagtccttcgtgcccggtgctgccgccgttctgcgccagctgaccaagctgaactctgtgtgtatgcccatgcgctatctgtgggtgtttgctgcctacatcgccctacgcaacgcctacgacaccatccctgccgagtaccgctttgtcaagaatcaggccgtggccaagttcttcggcggctggtgctttgccgttaccgccgtgtgctgcgtgctgggtatgtatgataaggaccccttcacctttgcactgaacgtcatcacccccgtggtgctgaccgtgctgggattcattctgcccgctcttgcaaagcgcgagcagaccgctgccaaaaagtaacctgaatatgcttatagcaattcaactttttaatgcaacggcaacagcgttgaattgcatatcgcaaatatgctgtttgaatgttgcactaatttcttgacttgcgataaaaagggccggtcagcactgaccggctcttttcagatacaccttaggaggtttatttttatgatcgcatccgaagtccgtgaaatgctgtccttcatcgacggcaaccccaccgcataccacaccaccgccgctgtgcgggatatcctgctgaaggcaggctttgcagagctgctggaaagccgcaagtgggcgctggaacccggcaaggactactttgtctgccgcaacggttccagcatcatcgccttccgcatgggcgaccagctggaaaattacagcttcaacgttgccgccgcccatacggattctccctgcttccgcatcaaggagaacgccgagatccacatggggcagaactacaccaaactgaacaccgagggctacggcggcatgatctgcgccacatggatggatcgtccgctgtctgtggcgggtcgtgtgctggtgcaggagaacggcgccattgtttcccgtctggtggcgctggaccgcgacctgctgatgatccccagtgtagccatccacatgaaccgcgaggtcaacgataaggcttccttcaacaagcaggtggatatgctgcctgtgctgggcggtgcctgcgaggagggcgcgctgaaaaagctgatcgcagaggagctgaaggtgtccgaggagcagatccttggcagcgacctgttcctctatgtgcgggaaaaggccaccgtctggggctgcaacgaggagttcatctcctgtggccgtctggacgatcagcagtgcgtctacggcatcctgaaaggtctgctgaccgcaaagaacgcccgctccatcggcgtggcagccttctttgataacgaggaggtcggctccggcaccaagcagggcgcagcttccaccttcctgtacgatgtgctgcaccgcattgcccagagccttggcggcagcgatgaggacttccaccgcgcggtggcttccagctttatggtcagtgccgacaacgcccacgccgtgcaccccaaccacccggagcacaccgatgtgaacaactgcacctacatgaacaagggtgtggtcatcaagacccacgccggtcagaagtacaccagcgacggcatgagcgttgcagccgcccgggagctggctgcccgcgccggtgtgccgctgcaatactttgcaaaccgttccgataaggtaggcggcagcacgctgggcaatctggccatggcacaggtgtccatgaattgtgtggacatcggtctgccccagctggcgatgcactcctgctacgagaccgccggtgcagaggataccctctcgctcatcaagctgatgcaggagctgtacggcagtcactttgaagagactgctttcggcacgctttccatcagcaagtaaattgatataaaaaggactgccgtgcgctgcacggcagtcctttttgcatttatgaccctttatttgcggcgggtgagacagttcagcgccatcacgaccagcacaagaaaaccgatgaccagcaggataccggtcatgccgatgagcatcatgggcagggtggtcatccaggaagaaagatgaagcataaaggcacctccgttaagccatcagggaaaggatcagtccgccggcaaggacggatgcgatctgcccggaaacgttgacgctgatggaatacatcagcaggaaattctggttgtcctcggccagacccatcttgttgaccacgcgtccgctcatggggaaggccgaaatgcctgccgcgccgatcatggggttcagctttttgccctcgggcaggaacaggttcagcagcttggcgaacagcacgccgccagcggtatcaaagataaaggccacaagacccagcgccatgatgagcagggtatccggccggacgaacttgtcagcggtcatctgcccggcaacggtcagacccaacagcagggtgatgaggtttgccagtacgttctgggcggtctcgctcagggagttcagaactccgcactcccgcagcaggttgccgaacatcaaaaagcccaccagcgccacgctggccggggctaccagaccggcgaccaccgtgaccacaacggggaacaggatcttggtcagctgggtgacattgcctttttcgtagggcatacggatgcggcgctccttctgggtggtcagcagacggatgaccggcggctgcacgatgggcaccagcgccatgtagctgtaagctgccaccataatagcgcccagatactgggatttcagggtgtttgccacaaaaatggcggtggggccgtccgctgcgccgatgaccgcaatggatgcggcatccttcatatcaaagaagaacccggccagaaacagggtgaaaaagatgccgaactgtgccgctgcgccaaacagcatgagccacggcttttccagcagcgggccaaaatcgatcatggcaccgatgccgatgaacagcagcagcgggaacagctcgttggacatccctgcttcaaacagggcagagatagggccgacggtgtctccctgcgtgatggcaccggatgcgggaaggttgaccagaatggcaccaaaccccatgggcaacagcagactgggctccatctttttgacgatggcaaggtaaatgagcagggcaccgatgccccacatgaccaccatctgccatgtcagcgccccgaagtttgaaaagagcgcggcgaatgtgttccagaaattcatattgtttttctgcctccttttgttctgatgctgcggcaagaaaaaagagacccttgccacagcgtacgatctgtgacaaaagtctcaagcgaacacatgacatcgggcattgctgccgtgatgacgctgccatgcagcggcctgccggaaaaaagccttgaccggcgggctgccctttactcccctttatcatttttattgataccagaaactgccgcttctgtcaagggggaaaatgcgtttttgcgcaaaaatccaatagacggatgccgtttccctctacgcccatcccgtgaaaaggcgagccgaaaaatccgcaattttagttatagatgcagctttcctttgcggctcctcttgtgaaaaggccaaccgggaaaatccgcagattttcccggttggcaaaatataaataatttttccgctgaaaatggtcagagcgcagcggagaccattccaaaccgttaatccaccaccggtacatccagcccgaactcctgcgggcggaagcggggacagacgttctcggtgatgcagatgaccgaggcggccagacggctgccaatctcgcaggactctgccagcgttttgccgtaggtcaggccgatgaccgtgcctgcaaagaaggcgtcccctgcgccggtggtgtccataacgtccacctttttggcgggtacgatgccgcagctgccgtccgcacaggcgtataccgcgccctgtccgcccatggtcaccaccatgctgggaatgttggcgctgcgcacgttgcccgtgagcacccggcacatctcgtccggggagaggtggtcgtaatcatccgagaacagcagcccggcctcctgctggttgcagacgaaacaatcgatctgctgcaaaaaatcccgccgctccatggcgatgctcatgttggagaccacggcaaacacctttttgccgtactttttggcgtagcgcagggtctgcttcaccgtctctttttcaagatccagttccagcgcaatggaatcgcagtctgcaaaaatggcatcgccctgctcctgcagcagaccggtcagcggggtggtgtccggccgcttggagatggcggcgtgcacatcaccatcgttgtcaaagatggccagccatgtgcccataccgtccggctttttctggataaagcgggtgttgaccttgtgccttgccagcttgtcgatgacgtcctgtcccatgccggtgtcgtccaccagacccacaaaggtggggcgcagctctacgttggcgatatcctctaccacgttgcggctcacgccgccgtgtacctgctcgatgcgtccggcgttgcgcccgccggggatataggtggaaaggggatagcccttgatatccacaaaaacagctccgatgactacgatacccataaacgataaacctttctgacttcagttgattttacctgtattatacaggaagcagaaaaaagatgctatccctttgccgttttttgcggaaaaatatcttccgggtgggacgattgggaatgcccgccgcttgcgctttgggcatcgtcagaggaaaaattatttttattttggattccgaaaagtctgcggacttttcggaatccctttttcacggaaaggggtcgtgaccggaagtggcagcttcaagatttatttttgcattttggaaagtctataatgattgttatagatgctttttcccgctacgaccctcccgtgaaaaggccaatcgggaaaatccgcagattttcccgattggcaaatataaatagtctttccgctaaaaatgcccagagcgcagcggagggcattctgaattccgtttctgtcacatcgccgtgcgggcggtgcgcaccagatactccatggcctgtaccgggtactgcccggcggcggtctcgccggtgagcatcaggctggatgcgccgtccagtacggcgttgtagatgtcgttcacctcggcgcgggtgggcacagcccgggtgtgcatactgtccagcatctgggtcaccaccataaagggtactccggctgcccggcaggcggcagaaagctgcttctggcagcggggcagctcccacaggggcatcgcgttgccaaggtcgccccgggcaatgactacctcatccaccagcggcaaaaactccggcagcgcctgcacgcccgcaaggttttcaattttggcaagaattttcagctgcggcgcaccggcttctgccagcgcctgccgcagattgcagatatccgccgcgccgcgcacaaagggcagcatgaccccggtaacgccgcaaccggcggcgatggcaaggttctccttgtcctcggtggtcagggtgggcatctggatatctgctcccggtgcggccagacttttgcggctttgcagcacgccgccccgcactacggtgcacacgagcgcttccggctccacggcgtccacccgcgccagcagcttgccgtcatccagcagcagctcctgcccgggctgcacgctgtgcaccagcgcagcagggcaggggatgccctgtgcgcccagacgcacggtctgcccggcggtcagggatagcggctgcggcagacgtccaatgcgcagttctggcccctgcaggtcgatgagaagctttttgaccccggccttgcgcagcagcgccagccagtccttgtgcgctgccagcgggccgtgagaaagattcatgcggatgccggtcataccggcttccaccatttgctgcaaaagctttacatcggcacaggcagggccgatggttccgtaaaaatccataattcctcctgcaattcgcgttttctttctattgtagcatgacggcgctgcaaaagatagcccggcggcgcacaaaaaaacaccggaagccgatgcaaagcctccggtgtctttttatgatgccttatggggtttactgctacactttgcaccgcctgcgttcagtacaaagcttacagctccctctatttttaaaggttgtacttagtttacagcatttcgggcatttcgtcaagggctttttccagcttttgccgggaaaaactggaatatcacaacattatcacaactgcagctggtggtagcacgcgccctccatggtcttccaacaggcggtgcttccctccaaggtcatgtagctgtgggcggtgctttccttgggaatgctcacggagccggggtttaagtaaaggttcccctgcccgaagtttgtccatgcgggcacatgggtgtggccgtggagcaaaatatcccccggggcaaggggcggcagatgattcaggttgaacacatggccgtgggtgacgtagaccagccgctgccccaccggcagcacggcgtaatccgccagcaccgggaaattgagcaccatttggtctacctcggcgtcgcagttgccgcgcacgcacagcagcttgggcgcaaggctgttcagcagcggaatcacctttttgggggcgtaatcccggggcaggtcgttgcgggggccgtggtagagcaggtctcccaagaacagcaggcggtcggcctgctcccgttcaaaggcctgctgcagctgctgcgcataataataggagccgtgcaggtctgatgcgatcatccatttcatatacaatgccctccctcagagccggtttgccttattgtagcgcctgctgtaaaaatggtcaagtgattataaaagtcatacttttgcgccaaaaccccttgacataccgccggggatgtggtattctgctaaagttgcagcccgcaaatgcgcaggctgcatatcgcggacagctgccgcgatcataaaaaccgtgtggatttttacagcaacattgctacttttcgccacacaatgacctttaaagggtcattgtgtggctttttttgcgcaggaaaccggctgcaagccgatgctgtgcccgccacatttttgctttttacagatagcaggtgaaattttttatgaacgaaacttttatgaaggagaagccggtgctgccgctgctgctctcgatggcgctgcccaatgtgctctccatgctggtaaacagcctgtacaacattgtggacagcctgtttgtggcgcgcatcagcgaggacgccatgaccgcgttaagtctggtgttccccatccagaacttttccaacgccattgccatcggctttggcatcggcatcaacgccatgatcgcgctgtatctgggcgcgggcgaccgcgaaaaggccgagacggccgccacccacggctttgtgctcagccttgtgcacggcgtggtgatgatggtggtcagcatcgccatcatgcccggctttctgcgccgctttacgcaggacgagacgctgatcgccgccggtatcacctactccaccattgtgttcctgtttttggtcgtgaacatggtctcgctggcctttgaaaagatctttcaggcagtgggccgcatgaaggtgtccatggtcgccttgatcaccggctgcgtgtgcaatattttactggaccctgtgctcattttcggccttgggccggtgcctgccatgggcattgcgggcgcggcactggccaccggcatcggtcaggcgctcagcgtggtagtttaccttgtggtctatctgcgcaccgagctgccggtgcggctgcgccgccgctgcctgcgcccggacgcagcgctggacggcagactgtacgccatcggcattccggccatcctcaatctggcgctgccctcgctgctggtcaccttcctcaacgggctgctggcagctttctcccaaagctatgtggtggtgctgggcatctactataaattgcagacctttttgtatctgcccgccaacggcttcgtgcagggaatgcgccccctcatcggctacaattacggcgcgcgggagcacgctcgggtgaaaaagctgttccagctgaccctgctcatgagcgcagccatcatggcggcgggcacggtgatctgtcagtttgcctccgggcagctgatggagctgttcacccagaatcccgaaaccatcgccgccgggcagaccgcgctgcgcatcatcagcatcggctttgtcatctcggcagtctccaccaccgcttccggtgcactggagggactgggcaagggcgcagaatcactggtcatcgcgctgtgccggtatgttattttcatcatgccgctggctgcactgctgtgtaactggctgggcgcagacggcgtatggcacgccttctggcttaccgaggtgctggcagcggcggtctccggcatcgtctaccgccgggcggtcacacataaaaaataagaatttctgataggggcgtttcataacgtccctatttttcattgacactacggtaaaagtaaggtaaaatattcttcgtgttttgacaaaaactgtcagtgcgcaagatattacagaggatgtggaagtatatgatcgagaccattgccgccgtcaatcaggcggtgaacagctttatctggggcatccccgccatggtgtgcatcattggcgtgggactgctgctcagtgtccgcacgggctttttgcagatccgcaaattcccctacgccatccgcaccaccgtgggccggatgttccgcaagcgggacgcttcggacggtgccatgaccccttttcaggcggtgtgcaccgcgctggcgggcacggtgggcaccggcaacattgccggtgtggcgggcgctatcgccatcggcggcccgggtgccgtgttctggatgtggtgctctgcgctgctggggatgtgcaccaagtttgccgaggtgacgctggctgtgcatttccgggagcgcagcgataccggcgagtgggtgggcggcccgatgtactatattaaaaacggccttggccgccgctggcagtttctggccgtgctgtacgcactgttcggtgtgctgaccgtgttcggcaccggcaacgcaacgcaggtgaataccatcgtggcggcggtggataccgccctgctggaatacgggctggtgggcagcagctttctgcccaccctcaacctcatcgtgggcatccttgtggcggtgctggtggcgctggtgctgctgggcggcatcaagcgcattggcagcgtaagcgagaagctggtgccctttatggcactgttctacattgtgctgtcggtgggcgtggtggtgctcaacttctcccgcctgccctatgtgctggaatccatcgtggcgggcgcattcaaccctgctgcctttaccggcggcactattggcagcctgttcgtcagtatgcaaaagggcgtttcccgcggcatcttttccaatgaggccggtcttggcaccggctccatcgcccatgcctgcgccgacaccaaaaagccggtcaagcagggtatgttcggcatttttgaggtgtttgccgataccatcgtcatctgcaccctgaccgcgctggtcatcctgtgcagcggcacctcggtcagctacggcgcagcggccggtgcagagctgaccatctccggctttaccaccacctacggcggctgggcttccatttttaccgctgtggcgctgtgctgctttgccttttccaccatcatcggctggggtctgtacggctcccgttttctggtgttcctgtgcaagagcaacaaggtggcgcgccccttctttgtggtgtatgctctggtagccattctgggcgctaccatggaccttggtctgctgtggagcatcgccgataccttcaacggcctgatgagcatccccaacctcattgcattgctgctgctttccggcacggtggtacagatgacccgcgccttttttgaatcggaagggtgagcggcagctctgcccatagtggacagaaacgccggaacgcggtatactgagagaaaaacaacggtggctatacaccacaggaggttctgacgtggaaaactttaacgaattactgcagaagtatgcagattttatcgtccgggtgggtgtgaacccgcagccgggacagaccctgatcatcaactgcccgctggagggtgccccgctggcacggctgtgcgtgcgcagcgcctacgaagccggtgcgcgggacgtgcaggtgaactggcaggatgacgccgttacccgcatccgcatggagctgggcagcgaggacgcactgaccgaccacaagggctggcagctgcgccgctatctggactacgccgagagcgagggcggcgtgtgcgtgctgcatcttattgcggacgacccggaactgtttgccgggctggacggcgctaagatcagccgtgtgaacagcgcgaaccgcagctttatgcagccgtggcgggagtacaccatgaacgaccgggtgcagtggtccatcgctgctctgcccgcagagccgtgggcaaagaagatgttcccggagctggacactgccgccgccattgaagcacagtggaagctcatttttgacacctgccgtgtgaccggcggcgacccggtaggggagtggcagaagcatctggaccgcctgaacgagctgggcgcaaagatgaacgcccttgatctggaaagcgtgcattttgaaagcgccaacggcaccgacctgactgtgggtctggcggagcaggctgtgtgggagagcgccggcagcaaaaacgagaagggcgtgcccttcctgcccaacatccccaccgaggaggtgttcaccgcaccccataaggataaggtggacggcatcgtttacggcacaaagccctatgtctttaacggacagctgatcaaaaacttccatgtcaccttcaaggacggcaaggtagtggagcacggcgcggacgagggcgcagatctgctgggtcagctgctggacaccgacgagggcgcacgccacattggcgaggtggcactggtgcctgcctccagccccatcaaccgcagcggcaagctattctacaacaccctgtttgacgagaacgccgcctgccacatcgcctttggcgacagctaccccggcaccaccgtgggcggcaccggcctttccaaggaagagctggcagcccgcggcatgaaccactcctccctgcacgaggatgtgatggtgggtgcagaggacagccgcatcaccggcaaatgccgcgatggccgcactgtacagctgttcgagaacggtgtctgggtgctgtaaaaagccccaaagggcgcgcaactgcaaaaaaattgcgaaaatgcttgcataaatcgcaagagtatgctatattctagtagtacgatatagtttaacctgaaacgtgggccgcaaggtccgcgtttcttgtttgtttggaggttttttatggcgaagcagtctggcggcaacaccgcgcagagagtggaagcgcttgtccgtcccacggtggaaggcatgggtctgcgcctgtgggatgtggtttttgagaaggaagggccggactggtatcttcgcatcctcatcgaccgggacggcaccatggataccgacacctgtgctgaggtgtcccacgcactggaccccattctggacgaagcggaccccatcgaccagagctattatctggaagtgggcagccccggccttggccgcaagctgacccgcccggagcactacgaggtgctgaagggtcagaaggtgcgggcaaagctcatccgccccaacgccgacggcgtgcgggaactgtccggcatcctgaccggccgcgagggcagcaccgtgacgctggagaccgaaaacggccctgtgacctttgaggtaaatgcagtctccggcgtgcagctgtgcgacgacgaggatctgttcaactgaaaataaccgtctctgagagagaaaagagaacaaaatatataggaggaacccgaaaaatgacagcagagaataaggacttttttgaagcgctctccatgctggagcatgagcgcggcatcaccgcagagtacctgatcgaaaagatcaaggcggctatcatcattgccgtcaagaagaactatgaggtcgaggaggatcacatccgggtggacatcgaccccgacaccggccgctttgacgtggcactgatccaggacatcgtggcagacgaggactggtacgacgagcacgccgagatcggtgtgaccgaagcacgcaagatccgcagcagctatgaggtcggcgaccgcatcatcaccccgctcaagacccgcgattttggccgcattgccgcccagaccgcaaagcacgtcatccgtcagggcatccgcgaggccgagcgcaaccagcagctcagcgagatccagtcccgcgcacatgatatcgtgcaggctaccgttacccgcgtggataccgagaagggcatcgttgcgctggatctgggcaagggcggcgaggctgttctgccccgcaacgagcaggtgcccggcgaggtgtacaccgagggcgagaccctgcaggtctacatcgtggacgtggtcagcaccgagcgcggtccccgcgtgatgatcagccgcacccatcccggccttgtcaagcgcctgtttgagctggaagtgcccgagatctttgacggcaccgtggaggtaaaggccatcagccgcgaagccggtgcccgcaccaagatggctgtctggtccaaggaccccaacgtcaaccctgtttctgcctgcatcggcgagcacggtgcccgtgtggctgctgttgtggaaaagctgggcggtgagaagatcgatatcgtcaagtggagcgaggatatctctgagttcatctccgcagccctgagccccgccaaggtggtcaaggtagagctgctgcccggcgagacccgctcctgccgtgtcaccgtgcccgaccagcagctgagtctggccatcggcaacaagggtcagaacgcccgcctgtgcgcccgcctgaccggctacaacattgatatccgtcccgagagcggctactacggcgaggacgaagagcccaagaaggacgcagcagacgctgaataagcccggcaccatctgccgaaggagggaaaccggatggcacaaaaaaagatccctgcccgccagtgcatcggctgcatgaccagccgccccaaaaaggagctggtgcgcgtggtgcgcgcacccagcggggagatcagcattgatctggtaggcaaaaagccggggcgcggcgcatatctctgccctgacccggactgcctgaccaaggcaaagaagaaaaaggcgctggagcgctgctttgagcagccggttcccgccgaggtatacgatgcgctggctgtacagctggccgcagccgcaaaggaggcagcagccgatggcaaaaaagaataacgcccccgcaaaacccaagctgcccccggaggaagcactgtatcaggccgtgagcctgtgccgcaaggccggtgcgctgaccatgggctttgacgccgtggaggaggcctgcgtaaaaagcaaggcatggctggtgatgaccgcatcggacatcagccccaagaccctgcagcgtttgaactacgccgtgggcgacttggtggacgtgttcaccatgccgctgacgcaggataagcttgccgatatcagccacaagcccgtggctgtttacgcggtgaccgaccgcaacctcgcaaagctctgcttcgaccgcctgtcggactgcggagcaatcaaaaatgaggaggatatgagcgaatgatcgtaaaatataaagtgagtgactttgcaaaggatctgaacctttctgcaaagaaggtgctggacgagctggctgctatgggcagcaccggcaagaagaacagctccaatctggaggaaaatgagctgaactacctgctggagaagttcagcaaggacaacagcgtggcgaatctggacgagtttctgaacagcgccaaggctcccaaggaggagcctaaggccgagaagaaggtcgaaaagaaggctgagaagaagcccgaggctcccaaggctgacaaaaagccccagcagcccgccgcaaaggccgagcagcccaaggcaaacaacaataataataacaataacggcaagcacggcgacaagaagcctgagcagcacaagaagcgcgaggaaaagaccgtttccttcagcgagctggcacgcgagaccggcgcaaaggccaccgctgcccccgcacaggcagtctctgtccgccgcgaggacaatcaggtcactgtagatacccgcactgtggatatgaacgtggatcgcttcgatgcccgttacgatgatctggcctctaccaagaataccgagaaccgccgcaagcccaccccgcagggcaacaagcagaagttcacccagcgcggtcagcgccagcgccagcagttccagaagggcaagcgtgagaccgagttcgagcgtctgcagcgcatccagctggaaaaggcccgcaacgcccagctgaaggtgctgatccccgacgagatcactgtgggcgagctggctgcccgcctgaagcagcaggccggtaaggtcattgccaagtttatgcagatgggcgagatgcacgccatcaacgacgtgatcgatttcgataccgcagctctgctggcagaggagttccacgcaaaggtcgagcatgaggtgcacgtcaccatcgaggagcgcctgttcacgcaggaagaggatgcacaggaagatctggtggagcgtcctccggtggtctgtgtcatgggtcacgttgaccacggcaagaccagtattctggatgccatccgcaagaccaacgttaccgcaggcgaggccggcggcatcacgcaggccatcggtgcatatcaggtcaaggtcaacgatagcctcatcaccttcctggataccccgggtcacgaggctttcacctccatgcgtgcccgcggtgccaacatgaccgatattgcagttctggtggttgctgccgacgacggcatcatgccccagaccatcgagtccatcaaccacgccaaggctgcaaatgtcaagctcatcgtggcaatgaacaagatggataagcccaccgcaaaccccgagcgcgtgatggaaggcctgaccaagtacggcatcatcaccgaggactggggcggcgatgtagcctgcatcccggtgtctgccctgaccggcatgggcatcaacgacctgctggagcgcattgctctggaagctgaggtcatggagctgaaggcaaaccccaaccgccgcgccaagggtgcggtcgtcgaggcccgtctggacaagggccagggccccattgccaccattctggtgcagaacggcactctgcacgccggcgacgtcatcattgccggtaccgctgtgggccgcgtgcgcaccatgcgcagcgacaagggccagttgctgagcgatgccggcccctctacccctgtggagatcaccggcctgaccgcagtgccggaagcaggcgacctgttcgaggctgttgaggacgagcgtctggcccgtgagctggccgaacagcgcgttgctgccgccaaggagaagcagttctcctccttccagaaggtcacgctggataacctgttcagccagatggcacagaacgacatgaaggagttggccatcgtggtcaaggccgacgtgcagggctctgccgaggctgtgaagcagagtttggagaagatctccaacgacgaggtgcgtgtgcgcgtcatccacgccggtgtcggcgccatcagcaagtccgacgtggatctggccgatgcctccaacgccatcatcatcggcttcaacgtccgcccggacaatgtggccaaggaagaagccgctgccaccaaggtggaaatgcgtatgtaccgcgtcatctacgacgccatcaacgatgtcaccgacgctatgaagggtatgttggcacccaagttccgcgaggtcgctctgggcgagctgcaggtgcgtcaggtgtacaagatctccaacgtgggcaccgttgcaggctgccgcgtgaccagcggcaagatcacccgcgacagcaaggtgcgcgtggtgcgtgacggtatcgtcattgccgaggacgagatcgcatccctgaagcgcttcaaggatgacgccaaggaagtggccgagggctacgagtgcggcgttaccctggagaagtttgcggacgtcaaggaaggcgacgtgtacgaagccttcaagatggaagagtaccgcgactaagcaaaaaccgaatatataacagcttcccggcagaaaaggcttcccccgtccgggggaagctgtcgaacgaagtgagactgatgagggcgtatctttcgcaggtgtggagcgtgcgccctcatccgtcgttctggcagacagatgccgcctttccccgggcggggaagggctttgggaagctgccgacagaatttggagaaaactatgtctcagaaaaatatgggtcgtcttgcgcaggatatgaagcgcgaggtcattgccatcatcggccggctgaaggacccgcggctggagggcggtctgctgaccgtcacccgtttggacgtgacgccggatctggatgtggcaaaggtgtatgtaagcgtgatgggccgtgcggacggccccaagcccgcaatcgaagcgctgaaccgtgccgcaggccatgtgcgcaccgaggtcagcaaaaaaatgcacatccgcaaggcaccccgcttcatctttgtggaggatgacggtgctgcctacgccgcccacatcaacgagctgctgcgcagcctgaacgtgaacggcgaggaagaagcacagcctgccgataccgaacagaccgaggactgactgcctttgcggaaaggatggatcattggatgacagaacaactgaatgtgcagcagatggcgcagcgcctgctggctgcggacaacattttgattctgtgccacaaaaacccggacggtgacaccatcggctgcagcagcgccctgtactacgcgctcaaagcgctggaaaaaacaacggcagtgctctgctccgataccgtgccgtcccgctacgcctttacgaacccacggctgttcaagggtgagttcgagccccgcaccgtgatcgcggtggacgtggcaggcttgcagctgtttggcgaaaataacggtgtgccgcagtttgcacgccatgtggacctgtgcatcgaccaccacgcaggcaacaacggctatgccgatttcacccttctggatgccggtgccgctgcggcagcagagctgctgtatcaggtcatcgtggagatgggcgtgcccatcaccccccacattgcggactgtctgtacaccggcattgccaccgacaccggctgcttcaagttctcctccaccacagccaacacccacacggttgctgcaaagcttattgaagccggctgccatgtagaggagctgaacaccctgctcttcgacacaaagccccgtgcccgcatggaggccgagcgcatcgcccgcaaccatctggaatactatctggacggccgctgcgccctgatctacctgacaagggacgagatccggcagagcggggtagaccccgcagatctggaagagttgaccggcctgcccatcagcatcgagggagtcaaggtcggtctgaccctgcgccagcagcccggcggcagctaccgcatcagcgtgcgcaccgcaaagggcgtggacgcctgtgccattgcccggaggctgggcggcggcggccacacccgcgcagcgggctgtgagctgctgggcgaccttgaaaacgccaagaatgcgatccttgcagaggtggaagccgagctggacgcaccgcaggaggaagcatgatgcagggcatcctgatcgtagacaagcccatggactggaccagctttgatgtggtggcaaagctgcgcggcgtgctgggcacccgcaagctggggcacagcggtacgctggaccccatggccaccggcgttctgccggtgttctgcggcggtgccagcaaggcagtagacctgcagctgaaccacgataagacctaccgcgccaccctgcgcctgggtgcacgcaccgataccggcgacagcaccggctcggtgctggagactgcacccgtcaccgccggagagaaggaactgctggctgtgctgccgcagtttatcggcccgcagatgcaggtgccgcccatgtactcggcggtcaagatcaacggccagccgctgtataagctggcgcgcgagggcgtgaccgtggagcgcaaggcgcgccccattgagatctacggcatcgagtacggcggcagtccggcagaaaacgagtatgtactgacggtgcgctgctccaagggcacctatatccgcaccctgctggaggagatcgccgccgccatggggcagaagggcaccatgagcgctctgcgccgcaccgctgccggtctgtacaccgaagcagatgcccacacgctggaagagatccttgccgcaaaggagcaggggagcgctgcgctggaagcactgatgctgccggtggaaagcgtgttcaccccgctgccgctgctggtggtggagccatgggtggagcagcatctgtacaacggctgccccaccagccgctaccccgcagcagacggacgctaccgggtgcgcaatgccgccgggcagttccttggccttgccaacatcaccggcggggtgctccgggtagaaaaactgttcgtggaacgtaattgagcaataaaggaaacaagacccatgcagatcatttctcagtttgccccgctgccgctgacgcagcccgaaaaaggcaccgccgtggctatgggctactttgacggcatccatatcggccaccgggcggtgatcgaaggggcggtacagtgggcaaagacccatggcgcagccccggcggtgttcaccttccgcctgccggtggaaaataaaatgaagggcaagcgcctgctttctaccgaggataagcacgccctgatccacagccttggggtggagtattacctcaccccggactttgaagcgatcaaagcgctgagcccggaggagttcgtgcacggcattgtggaaaactgccacgcccgggcgctgttctgcggcgaaaacttcacctttggcgcaaaagctgccggtacgccggagctgctgcgcaccctctgtgccccccttggggtagaggtggtggtggtgcccatggcacagtttgaggaaaagccggtgtcctccacccgcatccgcaccgcactggagggcggggatatccccgctgccaacgccatgctggggatgccctatgccatccgctttgcggtgcagcacggggcagggctgggacacacccttggggtgcccaccatcaaccagctgtacccgcagggcttccagatgccccgcagcggcatttatatcacccgcacctgcatcaacggggtgtggtatccctcggccactggtctgggcagccgccctaccgtgaacgatgatgccaccaaggtgacctgcgagacctttatcccgggcttttccggcgacttgtacggcaccgacccggtggtggagttccacgcctacctgagccccagcaaaaagtttgatacgctggaccagctgcgggactgcatcaacaatgccgcccgccgcgcacaggaatattttgcataacgcataagcagacaggccgttgcacagtattttgtgcggcggccttgtttgatgcgggacgatttgaaatgccctccgcttgcgctctgggcataattcaaggaattttatttttttatttgagcttccgaaaagtctgcggacttttcggaagccttttttcacggaagagaacggaacggaaaacggcatttccggcgtctgcgggcagaaaaaaccgcacttcgggcaaaatagacacatttccgtgcaacaacggtaaatgtttgttaaacaattatctatctcttatccttgcaatacacacagtttttgtttataatagtaactgtacggggcaacgccccgattgtgagcgagactctggttcagaattataatttgagaggagtttttaccatgggtttaggtaagaagacgatcgacgatcagaactactgcggcaagaaggtgcttgtccgctgcgatttcaacgtcccgatgaaggacggtgtcatcaccaacgagaaccgcatcaatgcagctctgcccaccatccagaagctggtcaacgatggcgctaaggtcatcctgtgcagccacctgggcaagcccaagaacggccccgaggctaagttcagcctggctcccgttgctgtggctctgagcgcaaagctgggcaagaccgttgtgtttgccgacgacgacaacgttgtgggcgagaacgcaaaggctgctgtggctgctatgaacaacggcgatgtcgttctgctgcagaacacccgtttccgcaaggaagagaccaagaatatgcctgagttcagcgaggagctggcttctctggctgacgcttatgtggacgatgccttcggcagctgccaccgtgcacactgctccactgcaggtgtcaccgactacatcaaggataccgctgtcggctacctgatggagaaggagatcaagtatctgggcaacgccgtcaacgaccccgtccgtcccttcaccgctattctgggcggcgccaaggttgctgataagctgaacgtcatctccaacctgctggagaaggtcgataccctgatcatcggcggcggcatggcttacaccttcgtcaaggctcagggctacgaagtgggcaagagcctgtgcgacgacaccaagctggactactgcaaggaaatgatggctaaggcacaggagaagggcgtcaagctgctgctgcccgtggatgcagtctgcatcaaggacttccccgatcccatcgacgctcctgtggacgtgaccgtggtgcctgtcactgcgatccccgctgacatggagggctgcgacatcggccccgagaccatgaagctgtttgctgacgctgtcaaggcttccaagactgttgtctggaacggccccatgggcgtgttcgagaaccccactctggcagctggtactctggctgttgccaaggctatggctgagagcgatgctaccaccgtcatcggcggcggcgacagcgcagcagctgtgcagcagatgggtctgggcgacaagatgacccacatctccaccggcggcggcgcttctctggagtatctggagggcaaggagctgcccggcatcgcagttatccagaacgcataatttttccggcatcacaatgggtgcggcggcatttacgccgccgcatcttttctttttgtgcaggtaatttgtaaatatttacgaaggtaaggagaaaataacaatggataaggcaaagcgcaaggctattatcgctggcaactggaagatgaacaagaccgcctccgaggctgctgttctggtggacgagctgatccccgccgtgaaggacgccgcctgcgaggtggtcatctgcaccccgtttaccgatctggtcaccgctgtggctaagaccaagggcaccaacatccatgtcggtgccgagaacgtccactttgagaagtccggtgctttcaccggcgagatcagcgccgatatgctggtggatctgggcgtggagtatgtcatcgttggccactctgagcgccgtcagtactttgcagaaactgaccagaccgtcaacaagcgcgcgctggctgctctgaacgccggtctgaaggtcatcctgtgcgtgggcgagagcctgcagcagcgcgaggagggcgttaccgaggagctggtccgtatgcagaccaagatcgccctgcgtgacgtgaccgccgagcagatggcaaacgttgtcatcgcttacgagcctgtctgggccatcggcaccggcaagaccgctaccgctgatcaggcagaggaagtctgcgctcagatccgcaaggtggtgggcgagctgtacggcgaggctgtggccgaggctaccaccgtgcagtacggcggcagcatgaacgccaagaactgcgaggagctgctgagcaagaaggacgtggacggcggcctgatcggcggcgcatccctgaaggctcccgactttgcagttatcgtcaacgcagccaccaagggctgagcaactgccttttcttaactagctgtttcagcgcccggctgcgccgttttttcagcgctgagccgggcgctgatctgttttacagcagccgctcgggtgttatgcacccgcaggctgtacctgcaggcagggcgcttagccttgcccgcaacgcgtgataaattcaaaggagattcaattttatggcaaagaaacctgttcttctgtgcatcatggatggcttcggctgggtgccgaacgagaccttcggcaacgccgttgtggctgccaagaccccccatctggatgctctgatggaaaagtaccccatgaccaccattgatgcttccggcatggctgtcggtctgcccgacggccagatgggcaactccgaggtcggccacaccaacatgggcgcaggccgcatcgtgtaccagcagctcaccctcatcaccaagtccatccgcgacggcgagatgctcaagaaccctgtgctggtcaagaacatgaaggccgccatcgaggccggcaaggccatccatctgatgggtctggtgggcaccggcggcgtgcacagccatgccgaccactggttcggcgtgctggaaatggcaaagcatctgggcgctaaggaagtctacctgcactgcatcaccgacggccgcgacaccgacccccactccggcaagggcttccttgctgacctgcaggccaagctggatgagctgggcgtgggcaagatcgccagcgtttccggccgttactacgccatggaccgcgataacaactgggaccgcgaggagaaggcctacgctgccttcgtctacggtgagggtgagcacgctgccaacgctgccgaggccatcgaggcttcctatgccgcagacaagaccgatgagttcgtgctgccctgcgtcacctgcgagggtggccgcgtgcaggatggcgataccgtcatcttcatgaacttccgccccgaccgtgcccgccagatgacccgcattttctgcgacgatgcttttaccggcttcgagcgccgcggcggccgcaagcaggtgaactacgtctgcatggccgagtacgatgccaccatgcccaactgcgaggttgcttatcccccggtggagctgaagaacgttctgggcgagtatctgtctgcccacggcaagacccagctgcgcattgccgagactgagaaatacgctcacgtcaccttcttcttcaacggcggcgtggaggctccctacgagggcgaggaccgctgcgtcatccccagccccaaggttgccacctacgacctgaagcccgagatgagcgcccccgaagttgctgccgagtgcgtcaagcgcatcgagagcggcaagtacgatgtggtcatcctgaacttcgcaaactgcgatatggtcggccacaccggcgtgttcgatgctgcggtcaaggccgttgaggctgtggatacctgcgtggatcaggtggtcaccgctgtgctgaacgccggcggctgcgccttcatcaccgccgaccacggcaacgccgagaagatgatgaacccggacggcacccccttcaccgcccacaccaccaacgttgtgccctttgtggcagttggctgcggcgatgtgaagctgcgcgagggcggttgccttgccgatatcgcacccactatgctgccctatatcggcctgcccgttcccgccgagatgaccggcaagagcatcatcgtggagtgatgccagacgggataaccggataaacaaacaaaaggctgctgcacattgcgtgcggcagcctttttgcgtaaagagacgattttgaatgccctccgctttgctctgggcataaatagcggaaagaaaatttttggtttgtttttccgaaaagtctgcggacttttcggaaaaactttttcacgggagggggtgcaatgccgttgtcctttacgaccccttctgtgaaaagggaatagcggagcgtccgcagacgctccgctattccgaaataaaaaataatttttccgctgaagatggccagagcgcacgcggaggccattttgatcgtcccacctgcaaaaaacttactttttcaggtggctgtcccagccgctggaggtggtggcctgcttatcgggcgtgcaccacatggcctctacgccgtccagcgattccaccagcttctgcccctcttccagcggcatacagaacagggcagtggtcaggcagtctgccatgccggagtccgggcacagcacggtgacgccgttgtagtaggcagcgggccacagggtgtccgggtcgatgatgtggtggtagcgcttgccgtccaccacaaagtagcgctggtagtcgccgctggtcaccagcgcaaggtcgctcatgttgatgggcgagccgaagatggaactggtgttggtatacacctcagaagcgttccacgggttctccacgccgcccgtccactggctgccgtccggctttgtgccgatggcgcgcaggttgccgcccacgctcaccagtgcgctggtcaggccgcgggcttcggcggcgcggcagaccatctccaccgcgtagcccttgcccacactgcccacgtccagcgacatctccgggtcggacagatagaccgttttggcgtcctcatcaatgacaagatcgttgatatcgcagtgctgggcagcggcttccaactcctcctgcgtgggcagggtgttgtcggcatcggaagcgtccttttcagcggcttcgcggtggtcgtgccagatgcccagcacactgcccatggcaatgttgatcttgccgccggtcaggtcgtacatctgccgcgccagctccagcatggagaggatgcggtcatccacctgtaccggggctttgccggcattgtcgttgatggccttaacgttcacaacgccggcatagtcgttgtagatatcgtagagctggttgtaggcgatcagatcctgatgcagcgcctgcatctgggtgttgaacgcttcctcgctctcgcagtaggcgatgacctgcgtcaccgtgtcgaatacgtcataaaagatggtggtgtaccgggtcagctcctttttgggcttgcagccgaccagtaggccaaggctcagcaccgccgccagcagtgctgcggtcatgcgggtgatgcggctcttcatacggtctggctctcctttgcagcgctaaaggcggtgtgctcctcctgcaaatgcgccagcaggtctgcaaacatccagttgcggtttgcaggggtgaccaccgccttgagcgggatggtcacctgtgcctgccgcatcaggtccagcagggtgtccacgtccttatcgtggaagtttgccagcaccagcgccgggggataggcaccgggctccagcaccagcgttctgggggcttttacctctacctcgcccagcagctgggcaacggtcttgccggcatcggcgggggcaacgggcagcagcttcatgccaaaggcgggtgccatgccctccagcttgccccggtcggcgggggaaaggttccagcccagcgccagcggcaccccggcgttctggttgcgtgcaatgtgtgctttcatctttaaaacctctttcggcagtgttttttcaaaatacactatagtataccataaaacccgtgaaaagaaaatgaaaacccgccggtgcacagaaatcaggggtatttaaggtaaaatgctgcttgcctgcgcgcgaactttccggcaaaaagaactgctgcacccggtcggcacagcagtccctgtgtataacaatattctttcgggcgggctcagttcatttttttgccgaagaactccacctctttgccgatgaactgcatcagctcatcgaactggtcgggggtcaggctctgagcgccgtcgcacttggccttggcggggttgttgtgcacctcgatcatcaggccgtcggcaccggcggcgaccgcagctttggccagctccggcaccatccatgcgtgtccgcaggcgtggctggggtccaccaccaccggcagatgggtcatcttgtgcagcatgaccacaccggcaaggtccagcgtgttgcgcatactggtctcaaaggtgcggatgccgcgctcgcacaggatgacgttctcgttaccctcggccatgatgtactcggcactcatcacgaactcttccagcgtgttggcaagaccgcgcttgagcagcaccggttttttctgacgtccaacggctttgagcagctcaaaattctgcatattgcgggcacccacctgaatgaggtccacattttcaaacaggggcaggtgctcggtgttcatgatctcggtcacgatgggcgaaccggtggcgcggcgcgccagcttgagcagatccagaccctcactgcgcataccctgaaaagagtagggggaggtgcggggcttgaaggcaccgccgcgcagcagggaagcgcctgccgcctttacccgctgggcgcagtaggtgatctgctcctcgctctcaatgctgcacggcccggcgatgactgcaaagttgccgccgccgatcttgacgccttccacgtcgataacgctgtcgtccgggtggaatttgcggttggcttttttgtagggctcggacacgcggcggcaggtttccaccaccgggtttgccagcacccagctctctgcaatggccttggtgtcaccgatcagacccagaatatgggtgtcgctgcccttggaatcattgatctgcagacccatatcctccagctcgtggcagaattcgcgtacctgtacgtcgggagcatcctgtttgagtacgatgatcatagtgttttgtctcctttgccttttcctatcgtgtaaaacggcgagggagaccggctcctttgccgcagcttgcagtgtaaaacttcagtgctctgaagtgcgtgacgttatgatatcacttcatgaaactgaagtcaagagaaattttgaattttttcggaaaaagtggtagaatagaaacagagcaaatgtaaaagagggaataacaatgggaaaagaagctaaaaccaacgcaatgcgcattctggaacgggaaaaggtggcctacaccgcccacgagtatccccacgaggagggggtggcggtggacggcgtgaccgtagccgccagcatgggcgaggatcctgcctgcgtgtataagacgctggtaacgcagggcagcagcaaaaactattttgtgttcgtcattccggtggcggcagagctggatttaaaggccgccgcccgcagcgtgggcgaaaagagcgtggcaatgatccatgtggcggatatcaacaaggtcaccggctatgtgcggggcggctgcagcccggtgggcatgaaaaagcagtaccgcaccgtctttgacgaaagcgtgctgacccagcagaaggtctacgtttccggcgggcgcatcggtacgcaggtgtgctgtgccccggcagatctgatccgcgctgcacgcgccgacaccgcaaagatcattttttaaaaatccggctttttatctgggatacatcaacacggcctttacataaaatatacccgctgcataagtcatacttaaaaagaaaaaggatggcgaaactgcacaaaactttcgaaagttttttgacggcatgggaacacaagggagaatttgcccaaacgctctttgcaaagcggtttttttgccgtaaactgtatctagcacagggacgatgccccaaaaaacgggcttgcatcgccgcctgaaaaaacgcttgcacaggaaactgcggagggaaacttcaatgatgctgctggtgccgggtcgcatggaatggggtcacattcactgcaatcaggggcatggtgcaaccttgtgcaaaatgcgcggacagaaaaactggaaataaaggccgtggtacaggtgtaccgcagccttttttgtttgtcggtcttgttggacatgagaaagagaggctttggaaaatggttcgtaaagtggcagtgatcatgggttcggacagcgattggccggtggtcaagggtgcctgcgcccagctgaaggcactggacatcccctttgaggcacacatcctttcggcacaccgcacccccgccgaggcagcagcctttgcaaaaagcgcaaaggccaacggctttggcgttatcctgtgcgcagcaggcatggcagcacatctggcaggtgcttttgccgccaacaccaccctgccggtcatcggcatccccatgaagggcggcgcgatggatggcttggacgccctgctggctaccgtgcagatgcccagcggcatcccggtggcgaccgtggcgctgaacggtgccaagaacgccgcatggctggctgctgaaattctggcgctgagcgatgatgcactggctgaaaagctggaagccgagcgcgtagccatggcacagcagatcgcagccaaggaagaaaagctgcagaacgaactgaacgagctgtaaaggagaaccaatgtctgattttgcatatccgctgcatgaggagtgcggcgttttcggcatctacgaccgtgccggtaccgaggatgtggccgcagcggcttattcagccctgtatgcgctgcagcaccgcgggcaggagagctgcggcatcgccgtcaacgatgacggcgtaatcaccggccaccgggatctgggccttgtaaacgaggtgttcaccccggaggtgctggcaagcctgtccactaccaaggcacacatggctaccggccatgtgcgctacgccaccgccggcacccgcgtccgcgccaacgcccagcccatgatcgtccggcacggccgcggcaccatggcgctgtgccacaacggcaacctgaccaacgccgtggagctgcgccgccagctggaaaacgagggcgccatcttccacggctcctcggataccgaggtcatctgctacctcatcacccgcaaccgtctgcgcatgggcagcatcgagactgccatcagcaagaccatggacgtgctggagggtgcatacagccttgtgatcatgtctgccaccaagctcatcgcggtgcgcgacccccggggctaccgtcccctgtgcatcggcaccctgcccggcggcggctacgtctttgccagcgagagctgcgcactggatgccaccggtgccgccctgttgcgggatgtggagcccggcgagatcgtggtggtggacaccaagaccggcgagctgcgcagcatcaaggatcactgcggccgcccggacacccagatgtgcgtgttcgagttcatctacttcgcccgcccggacagcgtcatcgagggcagctcggtgcacgaggcacgcaagcaggcaggccgcttccttgcacaggagcaccctgtggaagccgatgtggtcatcggcgtgccggattccggtctggatgcagcactgggctactcgcaggagagcggcatcccctacggcatcggcttcatcaagaacaaatacatcggccgcaccttcattcagggcagccagaagcagcgcgagaacagcgtgcgcatcaagctgaacgtggtgtccagcaccgtcaagggcaagcgcgtggtgctggtggatgactccatcgtgcgcggcaccacatctgcccgcatcatcaagctgctgcgggatgccggtgctgccgaggtgcactttatggtctctgcacctcccttcaagtatccgtgctacttcggcaccgatatcccggaccagaagctgctggtggctaccggccgcacgctggagcagatcaacgaggtcatcggcgccgatacgctgggctacctttccaacgaacacgttgtccagcttgccaaaaacgcaaaatgcgggttctgcaccgcctgctttaccggcgagtatgccgtagagccggaaagtgtgctttctaccgatattcacgaccgtcacctgaacgaccgtcccaaggacgccaaaaagttaggagagtaagaacatggaaaagagctattctgaaagctacgccgcagcaggcgtggacattaccgccggttaccgctctgtggagctgatgaagcagtatgtcgcccgtaccatgaacgagcactgcatcggcggtttgggcggctttggcggcctgtttgagctggactgcaccggttacaagcacccggtgctgatctccggtaccgacggtgtgggcaccaagctgaaggttgccatgatcatggataagcacgataccattggtatcgactgcgtggccatgtgcgtcaacgatgtcatctgcgccggtgcaaagccgctggtgttcctggattacatcgcctgcggccgcaacgtgccggaaaagatcgccaacatcgtcaagggcgtggccgagggctgcgtgcaggccgattgtgcactggtgggcggcgaaactgctgagcacccgggcatgatgccagaggacgagtacgatctggccggcttcaccgtaggcgttgtggacaaggagaagatcctgaacaacgagaccatggcagccggtgacgtgatcctcgccctgccctccaccggtgtgcactccaacggcttctcgctggtgcgcaaggtgttcaacatcgacgccgaccccgatgtgctgttctccacccccgccgagctgggcggcaagacccttggcgaggcgctgctggctcccaccaagatctacgtcaagcccgtgctgaaggtgctggaggaggtgcaggtcaagggcatctcccacatcaccggcggcggcttctacgagaatatcccccgcagcctgaagaagggctgctgcgcccgcatcaacaaggcagatgtgcgcacccccgccctgttccacctgatgcagaaggtgggcggcatctccgagcacgatatgttcaataccttcaacatgggcgtgggcatggtgctcactgtgcccgccgagcaggccgataaggcactggagatcctgcacgccaacggcgagccggaagcctaccgtctgggcgtcatcgcagaaggtgagggcgtggaactgtgctgaacattgccgtgttagtgtccggcggcggcaccaatctgcaggcgctgctggacagcgaggcccggggcgagaaccccaatggtaaaattacgctggtagtggcttccaagcccggtgtctttgcgctggaacgcgccgccaaggccggtgtgaagggctgcgtggtgcgccgcaaggattacgccgccagcgaggaatttgacgctgcgctgctggaaacgctgcgggcgcacaagattgatctggtggtgctggcgggctttctgtccgtgctgggccccagcgtcattgcggcctatccgcgccgcatcctgaacgtgcaccctgcgctgatcccttccttctgcgggccgggaatgtacggtctgcgcccccacgaagccgcactggctcgtggctgcaaggtgaccggcgctaccgtccactttgtcaacgaggagtgcgacggcggacccatcctgctgcagaaggccgtggatatcctgcccggcgacacccccgaggtgctgcagaagcgggtgatggaacaggcagagtggaagctgctgccaaaagcggtggctatggtgtgtagcggagagatcgagtgaaaaaataaactggctcgccctctcaggccgcttcgcgtccagctctcccaaagggagagcccttggcaaaaccatgaactttgtgtggactgccaaagcctcccactttgggggaggtggcagcgcgtcagcgctgacggagagggcgaggtcgttatccgcaaaggagaacaacaatggaaaagatcaacctgaacgagtatctggtcgccaacgagtaccccggccgcggcattgcggtggcaatggcaccggacggacggcagatgtttatcggctactttatcatgggacgcagcgagaacagccgcaaccgcgtgtttgaccccgtgcccgagcgcggcggcatctgcaccatggcagccgaccccgcaaagctggaagatcccagcctgatcatttataacccggtgctgacccttggcaagacccatatcgtgaccaacggtgaccagaccgataccatctacgacctgatgagtcagggcaagagctttgccgatgccctgcgcacccgcacctttgagccggactgccccaactacaccccccgcatctccgctgtggtgtacgctgacggcagctaccagatgagcatcctcaagtctgccgacggcaacggcgacagcgtgcagcgctatttctttgattacccccagcccgttgcaggcgagggtcacttcatcagcacctacaagcacaacggcaaccccatccccagctttgagggcgagcccctgcgctttgcctgcccccgcaccatcggtgattttgccgcgggtctgtggagcagcctgaacgtggacaacaaggtgagcctgtttgcccgggtcatcgatctggacaccggcgagagcggcgatatgatctacaacaagtacgactccgtttgcagcgatcttgacgaccctgaggagccggagctgctgcccgaggagctggaactgctcaaaaagcttgacgccgaggaaaaataagagtaaaccttaggatataaggaggatgcaccaatgaatgaactcgcactgaagtacggctgcaaccccaaccagaagcccagccgcatttatatggaagatggctccgacctgcccgttaccgtgctgaacggcaagcccggctacatcaactttctggatgccctcaactccatccagctggtcaaggagttaaagactgcctgcggtctgcccgcagcggcttccttcaagcacgtttccccggcgggcgcagcactgggtctgcccctgaccgaggtggagcgccggatgtaccacattgccccggagacagagctttctccgctggcctgtgcctacgcccgcgcccgcggcgcagaccggatgtcctccttcggcgactggatcgccctgtctgacatctgcgacgtgcccaccgcaaagctgatccagcacgaggtctctgacggcatcatcgctccgggctacgagccggaggcactggccatcctgtccggcaaaaagaagggcaactacaacgtggtcgccatcgaccccgcctacaagcccgcgcccatcgagcacaagcaggtgtacggcatcaccttcgagcagggccgcaacgagctggtcatcaacgcagacaccatgctgaacaactgggtcaccgagaacaaggatgtgaccgaggagcagaagcgcgacctcattattgccctcatcaccctgaagtacacccagtccaacagcgtgtgctacacctacaatggccagaccatcggcgtgggtgcaggccagcagagccgcatccactgcacccgtctggccggtcagaaggccgacaactggcagctgcgccacatggacaaggtgctggacctgcccttccgcgacgatgtggcaaagcccaaccgcgacaacgccattgatgtttacatcggcgataccccggaggacgtcatcggtgatgatgtctgggccgagaccttcacccgccagcccgagccgctgaccgccgaggaaaagaaggcttacctcagcaaggtgaccggtgtttgccttggttcggacgctttcttccccttcggcgacaacatcgagcgtgcccgccgctccggcgtgaccgctatcgtgcagcccggcggctccatccgcgaccagcaggtcatcgacacctgcaacaagtacggcatcgccatggccttctgcggcctgcggctgttccatcactaaggggaacgggctcgccctctccgtcattgcttgcgcaatgccacctctcccaaggggagaggctttggcagtacggcaaagtttccggttttgccaagggctctccccttgggagagctggacgcgaagcggactgagagggcgaggcagctgacggaaagaacgaaagtttaggagaaaatgatatggctaagaaaatcttagtagtgggcggcggcggccgcgagcacgccatcatcaaggcactgaaaaagagccccgactgcggcgagatctggtgcgcaccgggcaacggcggcatcagctatgacgccaagtgcaaaaacatcaaggccaccgatgtggataccatggtaggctttgcagtggaagaaaagttcgattacgttgtagtggcgcaggacgacccccttgcactgggcatggtggatgcgctggcaaaggtgggcatccccgcctttggcccggacaaggctgctgcccgcatcgaggcttccaaggtgttctccaaggacctgatgaagaaatacggcatccccaccgcaaagtacgagaccttcgatgaccccgcaaaggtcatggattacatccgcgccgagggcaagtacccggtggtcatcaaggcggacggccttgcactgggcaagggcgtgctgatctgtgagaacgagcagcagaccgccgacggcgtcaaggagatcatgctggacaaaaagttcggcgcatccggcaaccatgtggtggtggaagagttcctcaccgggccggaggtcagcgtgctgagctttacggacggcaaggtggtcaaacccatggtctccagcatggaccataagcgcgccaacgaccacgacaccggcctgaacaccggcggcatgggcaccattgcccccaacccctactacaccccggaagtggctgcggagtgcatggaaaagatcttcctgcccaccatccacgccatgaacgccgagggctgccccttcaagggctgcctgtacttcggtcttatgctcaccccggacggccccaaggtcatcgagtataactgccgcttcggcgaccccgaaacgcaggtggtgctgccgctgctggaaagcgacctgctgcacatcatgcaggcgtgcaccaacggcacgctggcagagcaggaggtcaaattctccgatggtgctgcagcctgtgtcattctggcttccggcggctaccctgtggcctacgagaagggcaagcccatctccggccttgtggacggtcagctgcccggcgaagagaacgtgacggtgtaccattccggcactgccattaccgaggacggccagctggtgaccaacggcggccgcgtgctgggcgttaccgccaccggcccgcgcctgaccaacgccctgagccacgcctacgaagcagccgagaagatcagctttgaaaagctgcataagcgcagcgatatcggcctgcgtgccctgaaagcgctggcagagaagcagtaaaaaaactccctcagtcacgccttacggcgtgccagctccctctgggagggagcctctggcgagaaggggaactttccggttttgccaaaggccccatctcagagggggctgtcgccgaaggcgactgggggagttgactgccggatgataaaacctacacaaaagtccattcgataaaatacaaagggggaacctacccaatggtctatcgtatttatgtggaaaaaaagcccggctttgatgtcgaggccaacggtctgaaaaacgaactcatcagcctgctgggcatcaaggacctgaccggtctgcgcctgctgaaccgctacgatgtggaaggcatcgatgaagcactgttcaaccagtgcgtcagcaccgtgttcagcgagccgccggtggataacacctatgccgaactgcccgctgccgagggcgtgtccttcgcggtggagtacctgcccggccagttcgaccagcgcgcagcttctgccgccgagtgcatccagctcatcagtcaaggcgagcgcccgctggtgcgctctgcccgcgtctacctgctggagggtgctctgacccccgagcaggtggccgagatcaagaagtatgtcatcaaccccgtggaagcccgcgaagcttctttggagaccaaagagaccctgaagatggagtaccctgtgcccgctgccgtggcagtgctggagggcttcaaccagctggatgaggcaggtcttgccaagttcatcgaggaaaagggtctggccatggatctgggggatatcaagttctgtcaggagtacttccgcaccgagcagcgcgaccccaccatcaccgagatcaagatgatcgacacctactggtccgatcactgccgccacaccacctttggcaccattctggacgatgtgcagatcgacgacgccgtggtgcaggaagcctttgaccgctacatggctatgcgcaccgagctgggccgtgagaacaagccccgctgcatgatggaccttgccaccattggtgccaaggagctgaagaagcagggtatcctgaagaatctggacgagtccgaggagatcaacgcctgcaccgtcaagatcaagtgcgatgtcaacggcaaggacgaggactggctgttcctgttcaagaacgagacccacaaccaccccaccgagatcgagcccttcggcggcgctgctacctgcatcggcggtgccatccgtgacccgctgtccggccgcagctacgtctatcaggccatgcgcgtcaccggcgcaggcgacccgctcaagccggtcagcgagaccatgcccggcaagctgccccagcgcaagctggtcaccaccgcagccgccggttactcctcctacggcaaccagatcggtctggctaccggtcaggtggacgagatctaccaccccggctacgtggcaaagcgcatggagatcggcgctgttgtgggcgctacccctgcttcccacgtccgccgcgagtgccccgctcccggcgatgtgatcgtgctgctgggcggccgcaccggccgtgatggcatcggcggcgctaccggctcttccaaggctcacaagctggacagccttgagcactgcggtgccgaggtgcaaaagggcaatgcgcccatcgagcgcaagctgcagcgcctgttccgccgtgaggacgcctgcaagatgatcaagcgctgcaacgactttggtgccggcggcgtttccgttgccatcggcgagctggccgacggcctgtacattgacctgaacaaggtcaccaagaagtacgagggtctggacggcaccgagctggccatcagcgagagccaggagcgtatggctgttgcccttgccccggaggatgtggacaagttcatcgccattgccaccgaggagaacctcgaggcaacccccgtggccaaggtcaccgaggagaagcgcctgaacatggtgtggaacggcgtttccatcgtgaacatcagccgcgagtttttgaactccaacggtgcagagaagcaccagaacgtccatgtggaaaagggcagcgtctggcagccccagtggtccggtctgaccttcagccagaagatgaagtccatggtgggcgacctgaacgtctgcagcaagaagggcctttccgagcggttcgactccaccatcggtgctgctaccgtgctcatgccctttggcggtgcataccagctgacccctcagaacgccatggtagccaagctgccggtggacggcgagaccagcacctgctccggcatggcatggggctataacccctacctgatgagcgccaaccagtatgtgggtgcacggatggctgttattgagagcgtgaccaagctggttgccaccggcttccgctacgaggacgcctacctgaccttccaggagtacttcgagcgtctgggcaacaagcccgagcgctggggcaagccgctggctgccctgctgggcgcactggatgcacagatcggtctgggcattgcttccatcggcggcaaggacagtatgtccggctccttcgagcagctggatgtgccccccacgctggtgtcctttgccaccgccatcggcaaggcaagccgcgtagtctccaccgagttcaagaagcccgagagcaccgtggtgctcatccgtcccatcatcgacccggagaccggctgccccaacttcttctccctgaaggccaactatagaatcgtagagaacatgatcgaagagggcatggtcgctgctgcctgctccgtgggctacggcggcattgccgaggcactgttcaagatgggtctgggcaaccgcatcggcttcaagatgcgtgcagatatgaccacccaccagatgttcgagcccatgtacggctccatcattctggaaatggtgtctgattctcccgccggtatgctgctgggcgagaccaccaaggagtacaccttcgagtcctgcggcgaaaagctggatatggccgagctgcaggagatctgggagagcaagctggagcccgtgtatccctaccgcaaggccggccccgccgtggagaagatcaacggcagcctgaccgcccccgccgcacccaagatcggtgtggcaaagcccaaggtcatcatcccggtgttccccggcactaactgtgagtacgacaccgccaaggcctttgcccgcgccggtgccgaccccgaaattctggtggtgcgcaacctgacccccgccgacgttgccgagagctgcgaagcactggtcaaggccattgacgcaagccagatcgtcatgctgcccggcggcttctccggcggcgacgagccggacggcagcgccaagttcatcgcttccttcttccgcaaccctgcggtcaccgaggctgtacgccgtctgctgcagcagcgcgacggcctgatgctgggcatctgcaacggcttccaggctctgatcaagctgggtctggtgccctacggcgatatccgccccatcaccgcctgcgaccccaccctgaccttcaacaccatcggccgtcaccagagtatgctggtgcacacccgtgtagcttccaccggcagtccgtggctcagcaagtgtgaggtgggcgagatgcacaccatcgccatcagccacggcgagggccgctttgtagcgccgcaggaggtgctggacaccatgctgcgcaacggtcaggtggctacccagtatgtggatctgaccggcgtgcccaccatggatcagcgcttcaaccccaacggctctgtgctggctatcgagggcatcaccagcccggacggccgcgtgttcggcaagatgggtcactcggagcgcagcggcgagtatctgtacaagaacgtcaccggcgataaataccagccgatctttgagggcggcgtggactatttcaaggtttgatggtagaataaataagcaaaagggtgtctgcctatataggcagcgccttcaaccgccaatgcagcgctggtaaagccttcccccggacgggggaaggtggcgcgcaagcgccggatgagggcgcaccgcaggcagctgttgcccttgagttccgtcagatcataggaggaaaacaaccaatgtcacagcatgatcgctatatcagccctttttccacccgctacgcttccgatgaaatgcagtacatcttctcggacgacaacaagttccgcacttggcggcggctgtgggtggcactggctcgtgccgaaatgaatcagggcctgaccaacatcaccccggacatggtagccgagctggaagctcatgtggacgatatcaactacgaagtggccatcgagcgggaaaagctggtgcgccacgacgtcatgagccacgtctacgcttacggccagcagtgccccaaggcagcaggcatcatccatctgggtgccaccagctgctatgtgggcgataacaccgacatcatcgtgatgcggcagggtcttgagctggtgcgtaaaaagctggtgggtgtgctggcaaagctggcgcactttgccaaggagtacaaggatatgccctgcatggcctacacccactgccagcccgcacagcccaccaccgtgggcaagcgcgctaccctgtgggccaacgagctggtgatggatctggctgagatcgaccatcgtctggctaccctgcagctgcgcggtgtcaagggcaccaccggtacgcaggcttcctttatggagctgttcaagggcgatgccgacaagatccgcgccgtggatgcttccatcgcaaaggagatgggctttgaccccaaggctgttgtgccggtgtccggccagacttacagccgcaaggtggatgcctttatcctgaacgcactggcaggtattggtcagagctgcatgaagtttgccaccgacctgcgcctgctggcaaacttcaaggagatggaggagccctttgagaagaaccagatcggttcctctgcgatgccctacaagcgcaaccccatgcgctgcgagcgcatctgcgcccttgcccgttacctgatggtggatgtgctgaaccccagctttaccaccggcacccagtggtttgagcgcacgctggacgacagcgccaacaagcgcgtggctatggccgagggcttccttgccactgacgccatcctgaacattatgctcaacgttaccgatggtctggtggtgtaccccaaggtggtgcgcagccgcctgatggccgagctgcccttcatggccagcgagaacatcatgatgcaggctgtggaaaagggcggcaaccgtcaggagctgcacgagcgcctgcgccagcacgccatcgccgccggcaagcaggtcaaggaagagggtctgcccaacgatatggtggaccgcattgccgcagacccggcctttggcctgacccgcgaggagatcgtggcagggcttgtgccggagaactttgtgggccgtgcaccccagcaggtggaggagttcatcgccaacgttctgcagcccatcttcgatgctgaccccgaggatgtggagcagcacgcttccctgagcgtctgataataagatcaattgcaaaaaaggagaagcccgcgggcttctccttttttgcgtttgtgccttgcacgattttgtctgtcatgttacactgagggcatcatcaacaaaggagaaccgcttatgcgtttggataaatatctggccgagactgcccagtgcacccgcagcgaggccaaaaccatgctggcaaaggggcgcgtgcaggtaaatggtgcggtgtgcaaaaaaggggacacccagctgaaggataccgacaccgtggcggtggacggcgcaccgctgacctatcagaaattcgtctacctcatgctcaataagcccgaaggggtggtgagcgcttctaccgataagcgggacaccactgtggtggatctggtaggggacgcctacccccggcgggagctgttcccggcagggcggctggataagaccagtaccggttttgtgctgctgaccgatgatggcggctttgcccacgatatcctgtccccacggcaccatgtttccaagacctataccgtgacgatcgacaccccgctcacgcaggagatgtgcaccggctttgcggcgggggtcacactggcggacggcaccgccctttcgcccgccgaagtgaccgccctttcttccgatgggcttaccgtgcgggtggtactgcggcagggggtgtaccaccagatcaaacggatgttcggtgtgtacggtgccggggtgaatgccctgcaccgggaggccattggcggccttgcactggatgcgcagcttgcgccggggcagtggcgggagctttctgacgaagaagtgggaaaaattaccagataaaacgctgcgcttttcacgcggttttcaaaaatgtatcacaatttaccggtaaaataacggtaagaaccacgcaaaaaggcacttttttggcaaaaaatggtcccgaaagataatttcaacaagaaagaattattttttttgttgaaatctgttgcaaaagtaaattcttttgtgtaaaatatagattgtaatgcggctaaattgtttaaaatcacaacccatgccgccgcggcttgcacaaacgaggaaaaggggtatccatttatggccaatagagtatttcaaagcgtgatctaccagatgaaggacgcgatcaatcgggtggtcggcgttgtggatgagaccggcgctgtcatttcctgctcggagctgaacctgatcggcgaggtgcgcgagggctatatggccgagcgactgaccgcaggcgaccgctttgtgcgcgacggctatacttaccagcagttctccaacgccaagcataacgattatgccgtgttcgtggagggcgtcgatgagactgcagggcagtttgccggtgtgctggccatcagcctgcagagcatcaagcagtaccacgacgaaaaattcgataagtccaactttatcaagaacgtagtgctggacaacatcctgcccggcgatatctacgccaaggcacgggagctgcattttgctaccgatgtctcccgcgtggtgttcatcgtgcgggtgatcagcggcggcgatatctctgcctacgatgtggtcagcagcctgttccccgataagcagaaggactttgtgttcaatatcagcgagaccgatactgtgctggtcaaggagatccgcaagggcatcgaccgcactgatatggaaaagctggctgccagcattgtggataccctctccggcgagcactacatcaaggccgtggtcggcattggcacccccattgccaacgtgaaggatctggctacctcttttaaggaagctcagatcgccatggaagtgagcaaggtgttcgataccgaaaagcagatcatccgctacgataacctgggcattgctcgtctgatctaccagctgcccaccaccgtttgcgagatgttcctgcgcgaggtgttcaagcagggcagcatcgaaagcctggatcaggagactttgttcaccatccagcgcttcttcgagaacaacctgaatgtgtccgagaccagccgcggcctgtttgtgcaccgcaacacgctggtgtatcgtctggaaaagatcaaaaagctgaccggtctggatctgcgtgagttcgacgacgctatcgtctttaaggtagcgctgatggtaaagaagtacctgtccaacaacccggccaaatactgatatttcgctgtgcgggccttgccccgccggcgccgaaccggccgctcgaaaccgatgctggccggttctttttgcagcatgggctgcggacgggctgtcttgaccgtcaaaaatcttgatgtcaggagctaatacgattccatgatcgattttgaacacgtttccaaagaatacaaaaagggcggacgccttgcgctggaggatatcaacttccatgtggatgaaggcgagttcgtctttctgctgggtcactccggcgcgggcaaatctactctgctcaagctgatcctgcgggaggcactgcctacctccggcaaggtgaccgtgctgggcaaggacgttgctaagctgcgccgccgcaagatcccttacctgcgccgccagatgggcatcatctttcaggacttccgcctgatccccagcatgaccgtgtacgagaacgtggcttttgccatgcacgtcctcaatgtgccccgcagggagatccgcccccgcgtggaatacattctggagctggtgcatctggaggataaggccaagtgctacccggataccctttccggcggcgagcagcagcgtgtggctgtggcgcgtgcgctggtgcataaccccaagctggtcatcgcggacgagcccaccggcaacattgacccggagctgagtctggaaatgatgcagctgctggagcgggtgagcaagatgggcatcacggtgctggtggtcacccacgagcacgagctggtgcaccgcttccatcagcgtgtggtcaccctgagccatggccgcatcatctctgacgtgcccgcagaccctgtggctgccgccgaggacgatctttcgctggatgttgccgcctttgatgcggacgatgcgtccgccgcgaaaaaggaggtggctgccgtatgatgcgtccttctaccttcttcttccttacccggcgcggtgtgcgcaacttgggcaagcactgggctatgaccattgcctgcatcgcttccttgagcgtttgcatgactctgaacatctttgccagcttggccgaggtgaacgtgggcaacatggtggcctatctgggcagccagaacgagacggtagtctatctggatcccgcgtgcgatgatgccaccgccgcgcaggtaggcgcgaccctttcggccatgccgggggtcagcggggtgcagtacgtttccaagcaggatgtgctcaacacctaccgcggctatatgcaggattattcctccctgtgggatgaatttgagaccgacaacccctttaaggccaactaccgggtcaccctgagcgatctgacccagatggagagcatgagcgtgaagatgcaggccatcccgggcgttgtcagcgttaccgccccggtggagatgaccaatatctttgtggagatccagaaagccgtcaccaagggcggacgcatgatcgtgctggtgctgatggtggtcagcatcatcacggtgggcagcaccatccgtctgagcgtttttgcccgccgccgcgagatcgagatcatgaagtatgtgggtgctaccaaccgcatggtcaccctgcctttctttgtggagggcttgaccatgggactgatctccggtatcctgaccgcagcggtcagccttggctgttacacctatgtggtcaacgcagccggcggtctgggcggcatctggcagatgctcatgggccgcgcactggtgccggtggcaaacgtgctgccgaccatcgtggtaacaagcctgctcagcggcgccatcgtaggcggcgtgggcagtatgttctctatccgcaaacatctgaatgtgtgaccgaaaggagccgcgttttatgagtaaagcaatgcacgcaaagcccttccggctcacaggcccttataccgcccggcacgcccggccggaaaacccccgcagcaagctgattcgcgtggtcagccttgggctggcctgtgtctgcctgctgctgacggccacggtgtacccggcctcggcagctaccaataacaccagcatggccagtttgcagagcaagctggataagctttcccagtctatcgatcagcacaaaaaggagctttcggacgccaaaaagaaggaatctgccgcaaaagcgctggaaagcgaactgaaggagcgggtcaccgttctgcaggatcagatcagtgtgctgggcggtcagatcgccgcagtgcagaacagcatcggcgagaaggaacagcagatcggtgtgatgcagacccagatcacggacaagcagacccagatcgagcaaaagcagaacgagatagatgctcagtgggatgatttcaaaaagcacatggctgccatgcaggagctgcgggacggcggcagtgtggccatgctcagtgcagtgaacgacctgtacgagctgcttaccttcaacgaggtgatgcaggatatctccatcaaggacaccgagatcatgaacaacatgaagtctgccaagcaggggctggaggacgataaggccgcgctggaagagcagaaggccggtctggaagccgaaaaggcagagctgcaaagccagaagagcgaactggacagccagaacgcccagatgaagggcaagcagagcgagctgaacaacagcatctctgcggcaaagctttccgctgccgaggcacaggcggcgcagcagaaggcacaggcagccattgaatccgacgagttgaactacgaggccgtgaaaaaggagatccagaagctgatcgccgcggcctctgccagcaagccgcagctgagctttaatggctttgcctgcccactgaagagttacagccgcatctccagcgagtacggctggcgcaagaacccggtctccggcgtaaacaagctccatgccggtatcgactttgcggcagccggcggcacgcctatctacgcagccgccagcggctatgtgcaggtggcaggctggtctaccggcggctatggcaactacgttatcatctaccacggcaaaatgtccgatggcaatacctattccaccctgtacgcgcatatgcgctcggtggctaccagtgcaggcaagtatgtaaagcagggtgaactgatcggttatgtgggtaccaccggcaattccaccggcaaccacctgcatctggaggtgtggaagggcggctccaaggccaacgccgtgaacccccgcagctgcatccccatcccccacaactaacaagcaacacaaggagtctggttgatctatgaacgaacaaaaacgcaagcgcgtgctgcgcatcggctgtctggttctggcaggggtgtttgtactctcgctgctgggcagcatccttatgatgctgctgctctgaccgggaggaacgaaccatgaaccgtaaaatttctttgggtatggcagtcaccatcgtgatccttgccatgaccgtgaccttttccatcacgatgctcatcgccatgcgtctgttcgacagcacggtcaacagcgtaaaagaaaaggaaagtatgtacaacaagatcgctgaggtggaccgctatgtccgcagcaacgattactacaccatcgatgagacgatgctgtacgaccgtctgaccgccggttatctgctgggcacgggcgacaagtacgcccgctactacaccgccaacgcctacaccgagctgatgaacatccagagcggcaaaatcctgggcattggcgtggagcttggcatcgaccagaccggctacgccaaggtgacccgcgtctacgacggctctcccgcgcaggaagcaggcatcgccgtgggtgactacatcaccaccgtaggcgataccgatgtcaagagcctgtccagtgcagatgccgtgtacaaagctctgcagggcgaggccggtacgaccgttactgtgacatggctgaacagtgctgccgccagcaaaacggctgagctgacccattccggctacaccagcaccaccgtggactaccagctgctggacaatgtgggctacattcgcatccgtcagtttgatggcactacgcccagcgagctggactacgccctgcgcaccctgaccgcaaacggcgcagccagtctggtattcgacctgcgggataacggcggcggcattctggaagatgcagtcagctgcatcgacctgatcgccccggagggcacggtggcctacgccgaggataaaaacggcaaccgcaccgtcatcggcagcagcgatgccgaaagctccgtcagcctgccgatggtctgtctggtcaacggcaacaccgccagcgcagccgagttgttcgcagccaccctgcgcaccatgaacggtgcccgtctggtgggcaccactaccatgggcaagggcaccatccagagcagcccgcagcgcctgtcggacggcagcgccgtggtcatcacagtggcaaagctggtctgcggcgacggcagctgctttgacggcaccggcctgaccgtggatgtggagcgcgccctgagcgcagaggaagctacgaacttctacgactacacgccccagaccgacccgcaggtgcagcgcgctgtcagcgctgcccagcagctgagcggcactaccacgctggcaggcgcaagctctgccgccgcagcggacagtgctgcttcctctgccgcagcagacgataccgcccccgcagaagctgcggagggagagcctgccgagggtgagactgccgcgtctgagccggaaacggctgcaagcgcagcggagtgagcccgcagatctgaaccataacaccaaaaaggctgctgcgttctgcaacagcctttttctgagaaaggaattgaccctatgccggaactgaccgacctttctgtgatccgtgccctgtgcgaaaaatacgattttgcactttccaagggctttgggcagaactttatcatcaacccgggcatccccaccaagatcgtggatgccagcggggtagacaagcgctacggtgtcattgagatcggccccggcatcggtgtgctgaccaaggagctggctaagcgtgccgccaaggtagtgtccatcgaggtggacgagcgtctgccgcccctgctggccgagaccatggccggggtggacaatttcaaactggtgctgcaggacgtgttgaaggtggacctgaaagcccttatcgccgaggagttcccggggatgccggtggcggtgtgcgcaaacctgccctactacatcaccagccccatcgtgatgaagctgctgggcgaccgtctgcctatcgagagtctgactgtcatggtgcagaaggaagccgccgaccgtctggctgctgtgcctggcacccgcgcttccagcgccatcagctgcgcagtgaactactacgccacctccaagctgatgttcaccgccgcaccgggcagcttttaccccgcccccaaggtgaccagcgctgtggtgcgcatggacatccgtcccacccccgccgtgcaggtggaggacgaggtgggctactttgcgctggtgcgcgccgcctttgggcagcgccgcaagaccgctgccaacgccattgcaggcgggctgaacctgcccaaggagaagatcattgccgccatcgaatccgcaggctttgatgcccgcatccgcccggaagccctgacgctggaagactttgccaagatccagcaggcgctgagctgagcactatattatagcgataagtcgggaaaatcgtagattttcccgacttatttttttttagacagcaaaaagggtcggaggaacgcttgcaagcggtcttccgacccgaaataaatttagcactcgtcgtactgcttttgcagatactgcaggcactgaacggcgttttccggggtggtgttctccaaggtggcgaacacatagggcttttgctccttggcgaaccgcagaatggtgcggtagtcgcccatgccgccctgtccggcaccggtggcagccagctgcccgccggcatcctgccgcaagaagtccttgaagtggatcatggccacgtccttgcccagcagctcgatggcttcggcaaacacttcctctcgttggtccacgttttccatgttcaaaagattcaccgggtccagcaggatctgcagattggggctgccgatctcgtccaacacggtgcgggcgcggcgggcgtcatacacgatgtgcttgaccaccggctcaatggcaatggtcacgccgtactgctcggcgcagcgcaccaccggcttgaagttcttgataaaagcggcaagggcggcatcgctgcggcactccgggcagaacttgtactccgcgttgggtgcaccggtctcggtgcccaccatgccgcagcccagcaggctggcaaagcggatgtgggcgtagtacttttcctgaatggcgtgcagggcatccgcatccgggtgcgccagattcaggtagttgcccagcaccgcaatgtccagctcgtttttggcaaacaggcggcgcagataggccgcgtagccgggggtgagggcagagggggtgttgggcacctccttcagggacttgctcagcgccagatgcacgcaggaaaagcccttctggtgcaccagcggcagcacctgctcaatgggcagcttttccgcgtcgtgcagacgcagaccgaattggatcatgcttggttcctcctttggtatggggttgtttttaccattatacaccaaaaatgtccgcgggggaacaccccaagccccttttagcgctgctgctcatcgtccagagtagtgacagacaatgcacacgataccaaaagtgtgttaaaacagaggaaagccgcctagatttcgacgaatctaagcggcttttcttggagctggtgacaggagttgaacctgcaacccactgattacaaaatagtcttattacgagttcgaccgtttttgagtgttctgttttgtataaaatcaccgtgctttttgtgcttgctcgttcacctttgtatcagcgctttttcggtcaataaggcacaaataaggcactttctggcgattgtgacttacggtgtccactgtggacacgatagcggctcagatccgcagacagaaaagaaagcagcccacaggcctagcggggtttcccttgcttcctgtgggctgtattgcgtctttggacgtgttatgcgcggctcttttcccggatacggtcaaacacaccggtcagcgcgtctgctgccgctgcatctgccgaacggatgaaaccggcgtaaatgtccgtggtggtgctggtctttgcatgacccagacggcctgaaactgtagtaacaggcacatgggcggctatcaacaagctggcgttggtgtgacgcaggctgtggaagtgtaccgccgggaggtcatgagcggccagaaaacgcccgaaccacgttgtcacatcgtctggatccatcggtgcgccgttccacttggtgaaaagcaggtcgttttctacgcgctttccttcgatctccacccggcgcacccattcggagccgattttaaaccgttctgccttttggtgctggcggtattcctgcaggagctgcacgcagtccgacccgactttcacacaccgccgggagcgctttgttttaggtgggttgaacaccgtacctttgcccgggatgtgctgcaaggtgcgttctattgaaatcgttcccgcgtccatgtcgatatcagaccaccgcagggcgcatatctcgccccggcgggcacctgtgagcaaagcaagctgtgtgataacgctgtactgtgtgggcgcgtcttgcagggcttccagcaggcgcacaacgtctttttcttccagcgcctgcacgtccacttcctgtgcttttggggcttctgcacgcttgcacggattctctaccacaagtccccactgcacggccttggtgaacacgctggacagcatccggtgatagtgctgcaccgtgtttccgttgagcctgccgcctgccttgctatgctctgtaaacgccttggaaaggggcagcccggcggcgctggctaccttttcagcggttgaccggctgacgtttccgcccctgtacagtgtcgccattgtccgctctgaaacccccgccgcctccgcgatctggccgcgtttgccctttggcagctgttccagcaaggccggaacagcggtataggcgctatcttcccgcacaccctgctcttcgaggttggaataaaaagccatcaggtgcgaggggttgacctggcacaccttgagttgccccagaccggcagaaatgcgcggcacaagccgccgatagtcgtacacggtcttgggtttgagcttcttttcggcgtactcggtgaaccagcgttctatcaggtcatccaccttcatagacgcatccagcgaaatgccgctgtgcacttcctgttcaaaggcatctgcctgccgctgcaattccttttccagcttcttcccggtcagccccggcgggggtgtataggtgcggtttaccagcacctgacgaccctgcctgtcgtagccgttggagacccggatgcagtaggagcaggagccgtctttctttgtacgctttatgatctttgccataggcttactctttctctacaggtgcattttcttcgtctggatcgtaatttagttgctctactggaattgttctgtcaaatctttcttttttataaatttcctcaagttcttccagaacatctgcgttgttatcccacggttcttgaaaagatttcagattgctttcaatgcgctcttgtattgagaactcatctttgattattccatctgtggcagcagatagggtggcgacaacaatgtctgttaggtttgcaacatctaagggctccaaggcattgcgctccatccctggctgctgatctaaggcgtagtaggtttcaaaggcatgacagccatcaaaaagttcgtagaccgcggtatagtcgcatttgccatatattgctttcaaaagacttatgacagctggaagagcacgttttcggagaacttcttttcggtgcctttcttgtgcgattaaaaaattttcatgatttgacgaagtaaataaatcaagaaaacctattccaagaacatctgctattttttttagcgtctcagattttggtcttaatattccgcgttcatacttgcctattgttgcgccatcaaggccgattttttcggcaagttcttgctgggtcagccctgctgccgtacggcaatcatgaatttttttacggattagttctggtgacggaatttcttcactaaggtcatcggctgtaaaagtatcaattgggcattccagcgcatccgctatcttttttaacgtttcgattttgggctttcgcagatcattttcccattgtgcaatagattgaaacgaaagccccatcttctgagcaagttctttttgggtcaggcctgcattttttcttgtggcttttatcttttgtcctatggtcatatagatcactccctaccctaagaatagcacaaagcgctctttatttcaatcaaaagacaaagcaaagctgctaattgttctattgacatttacaaatgattgaattatactgtttttaggccgaaattccatcaaacgacaaaattgaggtgataaaatgcgaatcgaccgtgtaaaactcatcgcagaaatggcccggcgggatatgcgggttcaggagctggcagataaggccacagtatcccgcgcaactgttaccgccttgcgtggcggcaagtcctgcaacgaaaattcaatccgccgggttgcccatgcattggatattcctgtagagagcctacttgagggtgtcggaggggagaaaatttcatgattcaccttatccgggactactatttgaacgtggacaggcagagcggcggatgctacaccgtcggaaaagcccaatcttgtgtttctgagcgcgttttactgtatcggtcaagatactaccctacattagccgttgccgtggcttctacggcagaaatcgcgctccgtgatgctatcgccgccggggatgtgcagaccttgcaacagtctgtacaggaattgcgctgcattcgggacgagatcataaccgctgtaggcgggaaggaggtgtgaaggcgtggaaaatgctataagatttcggagctatccgcagatggctaccgtcaaaaaggccgctgaactttttggggtgtctccaagctatctgcgcaggctgtgcaaatccgggaagattacgttcgtcaacacgggacacatttggctcatcaatttggatagccttgcccggtactttgacaaaggcgatccgggcccggcggggcaggatggagctgtgaacggtgtccgccgggttgtgaggtgactaccttgaaggaaaagagtcctgaaagcattgttttacgcttcgtttggttagaaaccctgacacaagactacaccaacgcggaaatcgggcaaatcatccgggacttgtatcattatgccagccaaggcacggagccccagcaatatgatgatcgtggaatgcgtggtctatggcgttcaatgaaagatggggtagacaaagacttttcaaaataccgtgagaagtccaaaaagaactctgaagcggctaaagcacgctgggtgaaacaaacgcaaaaagatgacgtacctgtcgtgcagaccgatacaaacgcattgtgtgaaatgcgaacgcatacggttgcatccaactgtatacattcgcaccctacaaatacaaatacagatacaagtacagctacagttacagatataccatcaactgccgccgcggattcatcccttgccaagatagtgcagcactttcaggaagtgataggtgaattcccacgttcggcactagacaagctccagcgctggcgcgaggtctaccctgtggaaattatccaagctgcgattgatgaagcggcagagaacaacgtgcgcaagtggcggtatgtagatggtattttgaaaggctggcaggtcgatggtgtgcgcactctgggcgatgtagaagcccggcgggatgcacgaaaaaaagttgttcaacagagcgaaaagaagatggaggtgctgcggtgaatatacaaaaggttttgcttggtaccttacttgtacaaccggagtttgcaccatacgttctgcctgtgctggaaatttccgactttgagccagatatacaacccatttttgcggctgcacagggcttctggacagctactggaaagctggaaaccatgcaagtctgtgaccgctatccaaaccagaaggcggcaatcttggactgcgcgaacgaatattctgccgagtgcatccatccaaaccgtgaaaatgtgttggcgtgggtgcgcattgtacaggaacaggctgcattgaaccgtttccaggcccttgctctggaatcggcaaacgctgtgtatgatgatctgcctgaactgtacagccggatgggcgaaacgttgacgatcggcaaaaacagcccggattttcaatccattggagaactgacagaagcgtacatccgagataaggacagcaaaccgcagtatattcccaccggggtttctgtggtggataagtttttgcatctgtcacccggtaatctgtttattatcggcgggcgaccatctgccggtaaaaccgccctgtccctgcaaatggcctgtgagcaagcccggcggggcttccgtgtgtgctatttctcgctggaaaccgaccccagaacgcttaccaaccgcattattgcgaactgcctggctgttcctctggcggaggttaaagccaaaattgttccccagcatgaacttgaccgcctcgcagaactgcacaagctgccgctgttcatccgctctgcatctggccggggtgttggatgggtaaaggcacaggctcagaggatgaaagcacaggttatttttatcgactatctgcaactgctggcagacggtaaggcgaaagaccgctatcaagctatcacgggaatttccattgccctgcatgagttggcacagaccaccggcatccttgtggttgcgctggctcagctgaaccgtaacgcggcgcacgctgcaccttccaccgccgatctgaaggaatccgggcagctggaacaggatgcagacgcaattttgctgttgtctgacgatggggaacagtaccgggccagcttggacaaaaataaggaagggcgtgtcggtattcttccgatcgcttttgacaaagagtgtcagcgcttccttgaggttgaggaaaggaggtgaacgctatgaagaaaacaaactcaaaccgcctacgccgccgagagccgtatcactacgatgcaaccggcgcgcagtatatcgcctgcatcgagacggccttgcaacatgggcaaagcatccctctgcacgtcttgcggctggtttacggtatgctgctaccctacatgcacagctgaaagtgtccacagtggacacctgaacccaaacaacccggcggggcaaccggacaataacgccgcacaaagaaagagggaatgtgaaaatgaccaacaaagaaatcattgcttgcctgactgcacaccctgaactcatcccggaagtaatgaaaattttagtgcccagtgaacgacagaacgataaataagcacggaggataagacaaatcatgactgataatgaatttttgcgctttttgaaagagcatccagagctttggggcgttgttatggatgtcttaaagaatcatcgttctgaaaacaaagataagaggtgactgaacaatggctgttaaagatattatggagcttctcgatgaacacccggagcttgtagacgaagctttggaaattttacgtgagtataaaaagaacccgtccattttgcacccggcgggatgcatgaaaaagcccagtacccccggcccccaaaaataagggcattgctcttgggccttattcgcggtgtcccttgacaatcccgccagcctcgtgcgcctgtgcgcgtgcgtgaatgtccgtcattctgcacaatacatccttactgaacgacccccgcccggcactcacaatgtcgcgcgggggcttgttgctacctgctcatttttatcgtgatgaaatttcatcaaacgtcctgcttggcagattttcgcgctatctatccatattccgccgggaaaacctgatgcaagccacggcaccccgcgacacaggacggcactccgtggcaccagatgcaaagagattacacgttattccaaatgggcgtagggatttccgctcatcaatgctgcatcccgctgcaccgctgttcacgttcgcccctcttgaaatatagccccctccatggtttaatgcaggcacacagagaacgacacacatcgaccagaaggaaaagaggtgcattgcttgaataatacgatccgctatccgaacatgggaaccgttaagaaagccgctgaaatctatggattgtcaccgtcctatatccggcggctttgcaagaccggaaaaatccggtatgtgaatgctgggcgcggctggcttgtgaatctggacagtctggctcggtactttgagcagggcgacccgcccccaacagagcaaagccagaccgcccacggcgtccggcagatcggatgatgaacacacccgggagcacaccgagaacgtacaccccgcccggcggcgaggtgtaacacactagactttcacggaaagtcgtgtgctcttgcagagggcctagtgcttgcaagcagggcagacgtatatacaatacgctgctcttgcaagcaatggccctgtacatacacggccccttgcgttgcaagaacttgttgggaagaatcccaaacccgcatagccgccatgctctggcagcgccgcagcacgcacacggcccgcactctgatgcacgcaaccaacgcaacccgccgggggagattttgcacagattagcagcaccacaccccgcccagcaccggcaggagaacgcccagcaccaccccgcacgcccatgatcagaccgcccggcggcatcccggacacacgcagcacacacccacacagcccagatcagacacccagccgcccacgctggaagctgtgcagcacccgcagccccacacgatcaggccccccagacagcacgaaagcccgcccgactatcaagccggacaggctttttcttttgcatgatggaaccggacaccgcccggcggcagcgatcaggcaagatgcaactgctctttcaaagcctgttgcagcacccgggagaagttgaccccctgcgccattgcggcgtcattcaaccacgccggaatagaaagggttttcttgacagacttttcaaaatgctttttggcatattctgccacatctacagaaaccacattcacgattgcttcacctaccggcatatccgggtcaagctctttggacacggccaccgggtcaacatccgccagcttagacggtgcagggattgcatccccatcccgctgtgcggtatacagatagcttgcaaggcattccacagccatttgcatagcatcctcaaagctatcaccctgcgttgcaagataattcaaatccgggaagatcaccgaatagccgtcattctctttgtagaaacaggctggatacatagacaacatactcatgccccctaacgtgtttggagaaagggcaagggcttatttaagccccgcctgtctccgaatagataactccgttcgtctgtcaagctctttacctttgtggaaagggatagtaaccttgccttctttggtcgggtgaacatactgcctgtgtgagccgttttgctctttgaacacccagccatccgcaaggattatcttttccatctcgcgcggttttaatggcatcgccgtcaactccttacaggtatagtatactgttttatacgtaatatgtcaatacgtaatcaaaacatttcatcctatcaccgttgtttcacagtggcatccatacccgatagtgcacagccagaccggtacacgctacactcgtccttgtggtgggaaagcccccggcggacaccatccggcacgcgcagcagccacacccagactgcccgcaaatctcgcagcctgaaccgccccgcccacgccgccgagcatccggcacaaggcactctgtaaggaacacgacaaggcattttttgagcgataaggcaaaaacaaggcactttcctggatgttttcttgcacagataaagcaaaaatcctacgatacgcaccgccatttcaacggtatatcgcaggatttttttggagctggtgacaggagttgaacctgcaacccactgattacaaatcagttgcgctgccattgcgccacaccagcaaaggttactaagatagtatagcacaggcacggccatttggcaaggattgttttttggcatgggataataatgccgaaaaacagacaaaaataatagaaaacagtacacaagtataaaaatatactacaattttaaacaattttacattgcaaattttttgacgatgtgttatgctgaaacgtagaggaacgccgccggaaaggcggctgcaaacagatttggaggatttgtattatggctgaccgcattgttctgaataccatctcctaccacggccacggtgccatcgagaacatcgttcccgagctgaccgcccgtggctacaagaaggctttcgtctgctccgaccccgacctgatcaagttcggcgttaccaaaaaggtcaccgacctgctggatgctgcaaactttgcctacgctgtttacagcgagatcaagcctaaccccaccatcgctaacgtgcaggacggtgtggctgccttcaaggctgccgaggctgactgcatcgtgaccatcggcggcggctcctccatggataccgcaaaggccatcggcatcatcatcaataaccccgagtttgcggacgtccgctctttggaaggtgttgctcccaccaagaagcacgcagtgttcaccattgcagtgcccaccaccgccggtactgctgccgaggtcaccatcaactacgtcatcaccgacgtggagaagaagcgcaagttcgtctgcgtggacaccaacgatatccccgagatcgctgtggtcgaccccgacatgatgtcctccatgcccaagggtctgactgccgccaccggtatggatgcgctgacccatgccattgagggttacatcaccaagggtcactgcgtcatctccgatatgttccatctggaagccatcaagctgatcagccagagcctgcgcggcgctgtgcagaacaccccggagggccgcgagggcatggctctgggccagtacattgccggtatgggcttctccaacgtgggtctgggcattgtgcactccatggcacacggcctgtccgctctgtatgacaccccgcatggcgtggcctgcgctatcctgctgcccgttggtctggagtacaacaagagcgttgccggcgagcgttaccgcgctgtgggcaaggcgatgggcgttgtgggcatcgacgagatgaacgatgtggaggccgctgatgctaccatcgccgccgtcaagcagctgagcgcagacgtgggcatccccacaaatctgcacggcatcctgaaggaagaggatatccagttcctcgccgagtccgcttttgcagacgcctgccgtcccggcaacccccgcgacaccagcgtggaggagatcgtggaactgtataagagccagctgtaagctgtaaaataagaactccgagagccgctgcaccgtgcttgtgcagcggcttttttagcggaaaattattttaaattatattgttccgggcagaccacagtctgcccggaacaatacttcggcaaaagaaaaagcataagccaattgtaacattttccaccacccccttgtataaatcggcgcaagcgagtacaatcagagcataaaaacagaaggcgaggaaagcgcgatgacactgaacttctacacgctgggtgtgctgtatttggtctattccttccttgggtgggtaggggagaccgtggtggccaccttccggggcaagcggtttgcaaaccgcggtatggcggcggggccgttctgctttgtctacggcaccactgccatcctgatggcagtaggctttgcagatatgcgtacaaagcccgtggcgctgtttgtggcctgtatgctcacggctaccgtggtggagtggctcacggcaaagcttttggagcggctgcacaaccgcaaatggtgggattactcggataaaaaattcaacctgaacggctacgtctgcctgcagtattcggtactgtggggtgcgctgggcatggtgactgtgctgtggggcaacgggctgctgctgcggctgtgtgctcttgtgccggactggctgctgcatccgctggtatgggtcgcgcttggcattgcggcgctggatcagctgggctcggcggtgctggttgggcggtatgcggcgcagcacccggtgctggaacagctgaaccagaagctggaagagcgctccgacaccctgcgccgccgcattgccgtgtatgtggaaaagcgcatccagcgcgcctacccggaagccgcccggcagcagcccacggcagtgcagaaaggggagatcgacttcctcagcgcggcagacctgctgtggctgttcgtcatcggggcgtttctgggtgatatggtggagacggtgttctgccgcctgaccgccggggtgtggatgagccgttccagtctggtatgggggcctttcagcgtggtgtgggggctggcactggccatggctaccgtgctgctgcggcagaatcaggaaaaaagcgaccgctatctcttcgccttcggcacggtgctgggcggcgtgtacgagtatgtgtgcagcgctgtcacagagctgctgttcggcacggtgttctgggattacagcaagttcaagttcaatctgggcgggcgcatcaacctgctgtactgctttttctggggcattgcggcggtgctgtggatgcgctacggctacccactggtgctcaggctgatgaaaaaggtgcgcagccatatccgcccgtggatgacggcggtgctggcggtgtttatggcggtgaatatgctcaccagcgcgctggcactggcgcggtacgatgcccgcaccagcggcgaagcgcccaacgggcagctggaggtatttttggacgagcatttcgacaatgcccgcatggagcgtatttatcccaacgccaaaaaagtgaccaaggcagaataaattccattttccccttgcgtttttgtcccaaagcaggtataataccctctggataaaagggagtaaggggcgtacctttgtaaaaaagtgcgctgtgctgcagcgacagacccggcagagatgcccgatgcagtaccgatgcttgagacttttatcacatttccccgttccgggcaggatgtgataaaggtcttttttattgcgcttctgccgacaccattcgaaaaaggagagattttatgctgatccctgttctgttgtttatcgtgggtctgctgtgcctgatcaagggcggcgactggtttgtggacggtgccaccggcatcgcccgccgcttccatgtgccggagctgctcatcggtgctacggtggtgtccattggtaccaccctgccagaggtcatggtgtccaccacctctgcactcaccggtcacggcgagatcgcctacggcaacgccatcggctcggtcatctgcaactctgcactgatcgccgccatcaccattgcggtgcgcccgggcaaggttgaccccaaaagcctgcgcaccccggtagccttcttctttgtggctgccgctttctatgccggtgtggcttacaccaccggctccttcacccgcccggtgggcctgatcctgctggcgatgttcgtggcttacatcgtgtgcaacgtgctggccatgaagaacgccaccgccccggaagaggaggagcaggcagaggaagggtcttttgccaaggagctgggtctgcttgccatcggtgcagtgctcattgctgtgggcgctgacctgctggtggacaacggcaccctcatcgcacaggcactgggtgtgccggagtcggtcattgcgctgacctttgtggcactgggcacctcgctgccggagctggtcaccgccatcacctcgctggccaagggccacggtgcgctgtcgctgggcaacgtcatcggtgcaaacgtgttcaatctggtgctggtcagcggcgtgtccgtcacgctggcacccttcagcattccgcagaactccaccatcgcaggcatgaacgcctctctggtgatggatatcccggtgatgtttgccgtgatgctgctgctcaccctgcccgcgctgatcaagggcaagctgagccgcccgcagggcattgcactgctgtgcatctatgctgctttctgcgccgtgcagttcagcatctgatccaacgtttttatgatcaaagaaccccggagcgtctgcggatgctccggggttcttttttacaataatcatccccgggcgtcctgccgggtggtgctgaaatattccttgggggtcatgccgtactcttttttaaaggcacggaaaaagtggttgtagccgccaaagccgctggtcttgtacacctcggtgatgggcagtccctgctcaatgagggtgcagcagcggtccaaccgcgcctttacgatgtagcggtgcaccgtctgcccggtctggcgtttgaattcccgggcaatatgttcccgggagacgaagaactccttctccagccgttccagcgtcagctcctcggtaagatgcgcctgaataaacaggaacacctcgtccagcatcaggtggtggcggctgaccgatgcggtgtggaactccgcatggatgcaggcacgcagcgccagcaccacgaacatctgcagaataccgtgctcgaacaccgctgcgccgaactgggtgcgctcctgcgggagcatcagcagcttccgggcaaggtttttcagcagcatatagatctggctgtccgggcggacagccacctgccggaaggggactacgttgaagcttttttcaaggtcggtgtctgcatccgaaagctgcgccagcgtctggggggacagctgtacccggataagctccagcgggccgtaggcaccggcatattccagcctgccgccctgaccgggcttgaagatgatgaggttctgctgctgggcgggcagcaccacctcggggcaccggaatacaccgctgccccgcatgaccagaaacaggtcgtaatatgcgccggagtaaaactcccggacggcgctctgctcaaaaaaataacgcttgactgtatagttcaccaaaaaaacctccgtgaaactgtcatgtgcaacaatttgttgtacacaacagaaaagtacaactgttataattgcataatacatcaattcgtgatagttttcaatcattttttggatatgtattgatggaaatttaacgtataatgcaaagtgtagaaaagagacttgtgcgaaaagtctcgtggtttcactgtttttaaggaggataaaacacaatggaccagaaaaagaccgtccgacccttctccatgaaggacaagatcggctatacactgggcgatctgggctgctgctttactgagcagtaccgtgccatgtatctgtcgatcttctacaccctgatcctgcaggtcaaccccttccatgtgggtatcctgctgctggtcaccaagatctgggacgccgtgaacgaccccatcatcggcgcgatcgtggactcccgcaaggccaccaagggcggcaagttcatcccttggatccgcgccttctccttccccatggcagtgctgtgcatccttggctttgtcaatgtgggcaatatcaactacggcctgcgtctggcctacatgttcgtcacctacgttctgtacgaggcactgtacacctgcgtcaacgtgcccttcggtaccctgtccagcgtgatgaccgatgatgtcagccagcgcaccgcactgtcccgctaccgcagccttggcggcaccatcttcatgaccgtcatggtcatgatcggccccctgttcctgtatgtggacaacaagcccgtggctggccgcttcctgatgctggcctgcatctgcgctatgctgggtctgctgtgcctgcagatcacctgcgtgtggtgcaaggagcgcgtggaagtgcccgagcgtccgcagggcgaaaagctgaactacctgcacgtgctcaaggagatctctcacaataaggctctgctgggcgttatgttcttcagcctcaccggcatgatcggcgcttccgtggtcaacggcctgaacacctacctgtacaaggacttcttcggcaacgttaaaattcaggctgtctccggtatgctgagcgtgctgtacgctgtgctgtcctttgccatcacccagcctctggccaacaagttcggcaagaaggagtggtgctgcatgggcgcaggctttgccgccatcgtgttcggcatcctgttcttcttccccgtccataaccccgtggccttcatcgtcatcaacggtatctgctatctgggcgcttccggtatgcaggtgctgatctgggccatggtcaacgacgccatcgactaccacgagctgcagaccggcgagcgcaacgagggcattgtttactccacctattccttcttccgcaagcttgcaagcgccatttccggcagcctgtccagctttgtgctgggtgccatcggctacaacgtgaccgcaggcgctgtgcagaccgcaggcgttgtaaacgctatctggaagagctacaccggcgtctacttcctgggctacggcattgcagttgccatcctgttcttcgtctaccccctgaccaagcagaagactgctgagatgctgaccgagctgaaggctcgccgcgccgcaaaggagagcaagtaaaccatgaagatcttacaggttcagtttaaaaaccgcaatggccacaccctgcgcggcatcgtgaccctgcccgacaccgagggcaaggtaccctttgtggtgcacctgcacggctttgccggcagctgcagcggctacaagtccatgtacacccacctgtcccgcgctttggcagcgcagggcatcggcagcgcccggttcgatttctacggcaacggcgagagcgacggcgagttcgaggatatgagcttcgacggcctgcacaccgatgcacaggatatctttgcatgggccgctgagcagccctatgtggacagcgaaaagctgttcctctccggccagagcatgggcggctacattgccgcttcctgcgcaccggtcatccagccccacggcctgatcctgctgtgcccgggcgccgggatgtggttcggctgcgcacagcgtgccgacggcgttgtgcagaccggcagggactacaccgacatggagggtctgtgctacaagatggcctttaactacgagatggccaagcaccccgatccctttaccgaggccaagggctacaacggcccggtgctgctgctgcgcgccgacgatgaccgtctggtggacgagggcacctgcagccgttacgcacaggtgtacaccgcacccgaggtggacaccattgcaggcggcggccacaactttgccacgctggcagcccgtgccgccgtggaggaaaagaccgcagcattcatcaaagcaaatctgtaaagcaaagcgtatctgcaaggaggcttttgtatggaaaacgtaattctgcagcccatcgaggtgggcggacagacctttaaaaaccgcatcatgttccccccgctgaccaccggctacgagaaaaacggcatgatcagcgagcaggacatgggcttctacacccgtctggcaaagggcggcgtgggctacatcgttatgggcgatgtggcacccatcaacagcttttctcccacccccaagctgtttgatgacagccagatccctgccttcaaggcactggccgacagtgtccacgcctacggcaccaagctgggcgtccagctcttccacccggagtacgatgtggacgccatcaacagcctgttcatgcagaagaagtttgacgagatgcgtcagcgcctgcatcacgacatgatgttctttaccgacgaggtcagcgaggagatgctgatggccatcatcgataagatgtgcgcctgcgcagtgcgcgcccagaaggccggtgtggacgtcatccagatccacggcgaccgcctgaatggctgcctgtgctccacccgcatgaaccaccgcaccgataagttcggcggcagtctggagaaccgcgtccgctttgcccggatgctgacccgcgccatccgcaaggctgtgccggatatggtcatcgactacaagctgtccatcgtcaccccgcagcgcggcaagggcggcattgacgaagccgacgccgtgcagtttgcccagtggctggtggaggacggcgtggatatgttccacgttgcccaggccaaccacaccggcaacatggccgacaccattcctcccatgggcgtgcagccctacggcttctttgtcaagatcgccggggatatcaaaaaagccgtcaatgtgccggtcagcgccgtgggtcgtatcgtggacgccgacatggctgcgcgtgtcatcgagagcggcatggcagatatagttgccatgggtcgtccgctgctggcagaccccgactggggcaccaagatcgctgccgggaaggcctgcgatatccgccgctgcatcagctgcaacaagggctgcaccgatgccatccagaaccgtcagttcctctcctgcgtgctgaacgcggagaacggctacgagaacacccgcagcatccagcccgcagcgcagaaaaagaagattgccgtcctcggcggcggccctgccggtctggaagccgcccgtgtggcagcgctgcgcggccacgacgtgaccctgtttgaaaagaccacctctctgggcggtcagctgaacattgcctgcgtgcctccccgcaaggaggagatgcgccgcgccgcacaggatctgatccacgcggtctgcaacgccggtgtgcacctgtgcatgggtcagacccgcaccgccgagcagctgaaggacgccggtttcgaggctgtcatcaacgctgtgggtgcacacagcgcagcgccccgcatccccggcatcgacagcgtgaacgttgccgacgcttggaaggtgctggcgggcgagcagcaggtgtacggcacggtggctgtcatcggcggcggcatggtaggctgcgagaccgcagagtatctggctgcccgcggttgcaaggtgtccgttatcgagatgatggacaagatcgccgcaggcgagagcgtcaccattctgcccaccctgctggaaaactacaagacctacggcgtggagcagtaccccagccacaaggtcaaggagttccgcatggacgccgttgtctgcgagaacaaggacggcgcagaggtgaccatcccctgcgattacatcgtgctggccatgggcgcacgctccaacgcatttgacgctgctgcgctggaagctgccggtatcccggtgtattccatcggcgatgccgccggcaaggctgcggatatctccaacgccatccgcaccggttacgataccgcttgccagctgtaaaacaaaaaatcgttctatttgtgggtcagaaacatctgtgggtgtttctgacccacttttttcaccctctcaggcaaagccttgacggcgatgactgaaagggtcatgacgcaatgccttttgcaatatttcccccggttaagcccggatatagaaatccaacggtagttgtggtaaaataaggcatccgggagcgccgggcgctccgctgcaacatgaaaaatggaggttatctatgaaaaagacctatcgctcgctcttttgcctgcttgcagtgctgctgctcagcgtcagcgtgctgccctctgcttcggcgctgttttccaaaaagctttactattatggcacggtagagggcgtcagccgcaccgtggagggcaaggtggagtccattctggtttctgcggaagagcaggaaacctaccagatgatcgtcaccgacagcaccgtctggcaggatcatgacgaaaagaccacctctgaccccgccacccttgcggtaggcgagcagatctgcgtggtgcacgacccggctgtgatgatgtcgctgccgccgcagtcggtggcgtataccgtcatccgcaacttccccgcaggcacggatctggaacaggaagcccgcgatgccgcctgcccggtgaaaaagttctttgccgacacccgcaaagccatttcggactggttctaccagaccatgcccatctgagcgtaacgttccttctataacgcaaaaaatctgctgccccgcaccggatgccaaagcgtccgggcaaaggggcagcagattttttatgcaaggttatgcggcgttttgcggcaaaaacgctgtataccgctatttattttcgggggggggtaacgcggaagcgcttcaccacctgttccagtgcgctgatatccacaggcttggacagatgctcgtccatgccggcttccttgcttttttgcatatcctcaaggaaggcgtttgccgtcatggcaaggatgggaatggttctgcccagcgggttttcaccgctgcggatgcggcgggtggcttccaagccgtccatcaccggcatctggatatccatcaggatcatgtcataatcgccgggcttgacgctggcaaaggcatccacgatctcctgaccgttggggcagatggtgcagcttgcgccttttgtttccagcagcatctgcaagatctcggcgttgatggcgttatcctcggcgcagaggaacttcatgccggacaggggagaagtggtctcttctacctccgggagcgcctgcgccttttgcaccgtgtccgcttcggtatcaatggggaattccagcactacctcaaagcgggtgcccttgccggtggcactctctacgctgatggagccgcccatcaggtctatgacgcttttggtaatagccatacccagacccgtgccctgcaccttgttgatgccggagcgctcctcccgggtaaaggggtcgaaaagggtcttttggtagtctgcgctcatgccgatgccgtcatcctgcaccacaaagcggtaccgggcgtagtgctcgttccggggcagctcttccacctcgaaccggatatgcccgccggtgggcgtatacttgaccgcattggagaggatgttcatcagcacctgattcaagcggttggggtcggccagaacgttttcgtgctgcagattggtgcttaccgtaaaggtctgactgcgctgacctgcctgctgccggatgatgctgtccagctgactgatctgctggggcaggttcatcttttccacattcagggtggtcttgccgctctcgatgcggctcatatccaaaatattgttgatgatgcccagcagcagttgaccggaagtttccagcttgcccagatgctcggcaagtttttccggctcgtgcagctcggttttcatcagggtggtaatgccgatgatggcgttcatgggggtgcggatatcgtggctcatgttggaaaggaagtccgtcttggctttgctggcacgctcggcggactgtaacgcctcggcggcagcatcctgcgcccgccgcatctcgtcgttggcctgcgtcagctggatgttatactgctccagacggaggttcgtctttttttcagcctgcagctcccgctgctgcctttcccgcaaaaggaaccagccagcaatgactgccatgatcgaaaacaccgttgcaaagcctacaataacgaccatgacgatattgaccaacttctgcgtgttcacggccacatattctgccggaacaaggaacgccagcgtccactgggcgttttccatctgcttcagggcgtagtaatactcagtcccgtccagcacggcgttggaataacaggagcctgtgcgggcaagccgctcctttgctgctgcaaaggaagaaccgtgcagataggacatctgggagagcacggtgtatacgttatgccccttcagcagctcggtatcattggcgttgaacagcttgaagcccttgttgtccagcacatagacgctgttgttattttcgtaggcgtcgcagcggaaataatcgttcagctgggtcatgctctgcgaaataccaaagtagcgcagggtgatctctttctctccgctttgcagtgtgatgggggtggagagctgttccagaaacaccatccgggagtcgtccacggtcagcgaattggaaacatagctgacccgctgcggcgcgttttccagatagttcatttcccgcagcagacccgtgtggccatactcggtataataacgcccggcagcatccacggcgatcagttcaatctgtttttcatggtaattggaaagctccgacagctttttcagatagcggtagagatcggtatcagtctccagcggagtatagtacaaataattgcattgtacattcacctcgtcccagtggttgtcgatcacatcctccagactgtggaacatctggtgggtgacctcttccatctggctcagccgctcgtggtagacaaggttttggatgtaggtctggctcatgacaaaaagggtcagaatcaacacgatgatgacaaagccggtgccccaaagcagcttttggtattttttcttgttcacatccagtatctcctgtccgttttattcaactccatgcggtgtctgcccggctgatggtggtgtaagcaccaaagaaggcttttgcggcatccatgcccaccacgccgctgtctgtcaccgttgcttcggcagccagctggtcgctcacaccgcagatagccacctgataggtcttgcccgcctccggctgcaccgggcttaccagcacataggggtagcccttgccgttgccgtaggcatcgtagcccgtggccagcaggtcgttgatctgctgaccggtcagggtgacggtctggatggtgcggttccagccggtgggcaggatggccgaaaggtcgtaatccgtaatgcccttggcgtacagcttggcggctacgccgtggtggttctgctcggtggggttgccggggatccatgtgctcagcgagaccagcgcaaggtcgctgccggtggcctgtgcaaagcagcggcctatcagcatggcgcagtcctgctgcgaaagctcctccgtaacggtagtgatgacatccggggtgttgttcaccacactgtcctgatcctcgtccagctgacggatgacatcctccatagtagcattgcccttgatgaagtccagcattttaaagccggtggtcacgatggtgttttcccagccggaatagataaagggcgcggtattgcctgcattcagggcatcggcaacatcagcgtaataggtgccgtctgcctttgcacccttgaagggcaacaggctgcttttcagcgccgttgcgggctgcagagcgctggtgcctgcaacggtggaaagcacacgcatcaccttgagcgcatcttccagcttctgggggttctgtttcagctttttattcagaccgtagaaacggttcacattcagcacaaaaacgttctgggtgccgtcctccgagagaaacggcatcagcccaaatttatcggcgttgccgtctgcctccacaatgccgttggtgtttccgatcaaaaacagggtgttcccctcggccatcctctgccgggtcacgttgtcgtcaagagcatcgccggagtcgttcagcatcccgatgttcttccactttttgacatacgccattgcctgcatcatgccgggggtgttgctgacgtttgccttgccggaaagataatccttctgccacagtctgccatccagcgtgccgaggaaatcggcatctgcaatgttgcacagatactggaaaccgtagcccggatactggatctgtgacaggcagagatcgaccccggcttccttggcctttgcagccagttcttccagctcagcaaaagaattgggcagctcccagccgtgtgcccgcagcagggtcttgttgtaggtgatgccgtagcagttgtaggtcgagggcagcaggtagatggcaccgttgtcgaacacgtcctgcagacgggactccacatagttatccgtaaaatcgtagccggaaaggtccagcagtttgtcggagaccagatcaatctggggatcgtagtaggtcaaggtgcagacgtccggcaggtcgcccgccgcaaacatattctccaaacaggtggtggtgttatcgccgctgtagggcacgacctcgatgtttacttccgggtaaacgctgtgtacctgctcaataaaggcttctatctccttataaggtgccataaaggtgatggcttcgtgctcatttgctgttttgctttcagccttaccgccgccgcaggcggtcagcgctgccgtggcggcagcaatactgcaagcctgcaaaaacgagcggcgggagattttcttcatcatacaataataccttcctcacagtttggctattcttacacaccccacaggaactcccacgctcgcggcctgtccgcactgggcatacgccgattttcccataaaatgacattcttattgtatcattgcaacaaaagcgtttcaagctgtttttaaaggtttttgcatggaaaaaggcgaaaaaccgcgtgctttgcaggtgctttccgtccggcggagttctgaaccgcagcagccggaaatagactgagatgacgcacaaaacgaccatgcagaccgaaaagagggtgcttatggaaaacacggcttttattctgtatgaaaaattctgctccgacagcggggaacagcgcagggaacagtttaaaaaggcgtttgagcgctatctcacggatgcactgcaaaacgatacgcccatacccttgcaggacggagcatagaagggagggcgattaagatgctgtgcagggatacctgtgccggaaacaaagggcgcagaccatgaaagcggcaatttactgccgcctgagcaaggaggatgaagggaaaaacggtgaatcggagagcatccagaaccaaaagtccatgctgaccgcgtatgccgcagaaaagggctttgaagtttaccagatctattcggacgaggattattccggcatcgaccgggagcgtccggcgttcaatgaaatgatccgggctgccagcgaacataagtttgatgtggtgctggcaaagacgcagtcccgctttacccgtgatatggagctggtggaaaaatatctgcacggaaagttcatcgaatggggcatccggtttattgccgtggtggaccatgtggataccggcgaggcggcaaacaaaaaatcccgccagatcaatgggctgatcaacgagtggtatctggaggacctgtccaacaatgtccgcgccgtgctggaccacaaacgcagggaggggctgttcatcggctcctttgcactgtatgggtactgcaaagccccggacgccaagggaaagcttgtcatcgacccggaagcggctgaggtggtaaggcgcatttttgcattggcgcttagcgggatgggtgcgcataagatcgcgcagatcctgaacaatgaaggcattcccagcccgacagcatacaaacagctgcacggtgcgcagtaccacgctgccatgaaaaaaacggattattcgctgtggggcagcccgactgtttatcagatgctccataatcagacgtacatcggagatctggtgcaggggcggcacaaaaaggtgggctataaatccaaaaagacggtctggctgccaaagtcccagtggatcgttgtagaaaatacccacgagcctatcatagaccgtgacacctttgaaacggtacagcggatgctggcagcgcgcacccggagcggcgtgcaggggacgatccatccgcttgccaaaaaggtggtttgcggctgctgcggcagctatatggagcagactgcccatcagccaagagcggatggcgttcaaagacgctatgtccgctgccggatgcaccagcgtgcgccggaacggtgcagcaataagacctgcactgacctgaacgcattggaaaacaccgtgcgggagcgtatccgagaatacgcagaggtctatgttgacccggaaaaggtggagctgccccagcgggatgacccggtgcggcagcgggcgcaggcaaagcgcagcgagctgaaacggctgcaatgcgaagcagaccggcggcgcagggctttgcagcagctgtatctggataaggtatccgggttgatcgatgccacgcagttttcagagatgaaccgggcgtttggggaggaaataaaaagtgcggaaagccgtatccgtggcttggaagcagaactggaacagcagccggaggaaacggacgccgctccggcgcaaaggcagcgtgtgcgggagctggcacaggtttcccgtctgacccgggagcttgcggtgcttttggtgcggcgggttattgtcggcacaaaagacccgctgaccgggcagcaggagatcacgatcgaatgggcgttctaagccggaaaacaccctgtctgcccgttggggtattttcgtccgcccatgtggggtagacctcactggaagcaacgttagcgatataatcccggaaggacaccgtcacgttgcgggcggcagctgccggtttgcccagatgtaccgtgatatttttggggatgacgacctgatccagcacccggggcgtgcagtgctgcgcaggctgcggtccgctgccgccgctgcccgcaaacaaagcgtgcggagggatgatgatgggcgcgttcgggatgtcccgcccttcctcggtgtcgggcagcatctggggctgcgccagcgttacctgtccggcaaagatctggatgccctcaatgcgcacggtgcggtagccgggctttgcggcggtcaggttgacaatggcgtaggggcgggtggtgttgtcctcgtccagcgagagggcgcaggcgggggcttcaacgggaatatcggcggcgctgccggtggcatcagtgatgcagtgcagggtaaagccgtccccctgcaccgcaacggtcaccccctccacgggggcagactggcgtgccgcaaaggtctggatgcggagagttccggtgtttttcatggagatacgctcctttgctggtaaaagtatgcttctgccccagcgtattccgtccggtgcccggacgtgcatggcaatgtccgcggcaaacaaaaaagccgcccgaaggcggcaggggagaatcgcttatttggcgctgtccttggcaagggcggcgtcaatatttttttgcagagcggcaaggttttcttccttgtcgatgccgcccagcaggggctggcctacaacattgccgtcccggtcaaaaacgtaggtggtggggaaagccatgatgttcagtgcaaacttgccggcctcgctgccggaggcaaagtagatgttgcggtagcttgcgccctttgcagccagcagctttttggcggcatcaatgccctgctggttgccatccagcgtctcggtgttgatgccgaccacctcgccgccctgtgccttgaccttttcatttagggcgttcaggtcgtccagctcctctacgcagggcttgcagccgttgaaccagaagttcaccaccgtaaaggcgttgcccgcaaacaggctgttgtccaccgggttgccctctaaatcgctgccctcaaactgggggaaggcagtgccctgtgcggcggcactggaagcagccgcgtccgcaggggcaagagcagcaatttgttcctcaatggcacggatcttttctgcatcggcggtcagggtcttgtactcctcgtccgagaactgatcctttgccttttccacggcactcagcagaaaatcgccgtagttcgtgctgagggtggtctcggtcacgtttttgtccatggaggagaacaccttctcccacagggcatcgtttgcggaaaggatctcgttttcctccgccagcagctgctcctcggtcttgctttccgctgccgcagaggaagcgaaagaagaggatgccgaagatgcagaggatgcgccctgcccgcaggcggcaaggctgaaagccagcacaaggctgagcgaaagtgcggttacacggttgaatttcatggttttactcctttgttgcttcagtgtttgattggtctcccaacccgaacttgtactggatggcatccgtaggacaggctttcatgcacatcccgcagcggatacattcggcgtggttgggggtcttggtaatgtctacgtccatcttgcaggcccttgcacaggcaccgcaggagacgcatttgtgggtgtctacgcgcatctggaacagcgagaccttgttcagcagcgcatagaacgcgcccagcgggcacagccacttgcagaaggggcggtagaacaccacgctgcccacaatgaccgccagcagaatgcaggctttccatgtgaacagcttgcccagcgaagcgcggatgcccgcattggtcagggagaggggaatggcaccttccagcacgccctgcgggcagaggtatttgcagaagaacgggtctcccatgcccagctcgttgaccgccagcaatggcagcagcaccaccatgaccagcagcaccgcatactttaaatagcgcagcggctttaactttttggtggagaacttaggggagggtatcttgtgcaaaagttcctgaaaccagccgaacgggcagaggaagccgcagatgaaccgccccagcagcaccccgaagaggatgagaatgcctgtgatgtagtaggaaaagcggaatttggaagagcccaccaccgcttggaatgctcccaccgggcaggcaccggtcgcacccgggcaggaatagcagttcagtcccggcacgcagacgtattttccgctgccctgatacagcgtccctttggcaaagttgggcaggtggatattggtcaaaagggtcgccccggcctgtataaagccccggaagcgagcaaggggatttggttttttcttatccaatgcctacacactccatacacagccggatggcttttgaaaatacggtatctgcctcgccccgccatacaccgaacagcagcatcagcaccccggcggcaagcaaaagcagctgcgcctgtttttttgtcatgaacatcatagcctcctgttgtttgatggcaccagtatacaccatgggagataaaatttctgctaagaaaatcttaacacgaatcttaacaccgtctgctataatctgttataatgaagaaaaacgcaagaaatggattttttacgggaagggtggaaaacaaaatgcgccttttggtagtagaggacgagaactccctgcgggaggacattgcccggaagctgcggctgtccgggtacgaggtggacgcctgtgcagacggcgaagccgcactggaagcgctggcggcagagcggtacgaccttgtactgctggacctcaacctgcccaaggtggacgggatgcaggtgctgcgcagcttacggcagcacgaccttgagacctgtgtgctgatcttatcggcgcgcagtgaaatttcagataaggtggagggactggatgccggagcgaacgattatctttccaagcctttccaccttgcagagctggaagcccgggtgcgcagcctgacccggcgcaagttcatccagcaggacgtctgcctgtgctgtgggcggctcagcttcaatacccgcagccgcgttgccacggtggatggtcagacccttgccctgacgcggaaggagagcggcgtgctggaatatctgctgctgcatcagggacgcccggtcagtcaggaagagctcatcgagcacgtctgggacggcagcgtggacagctttagcaactccatccgggtgcatatctctgccctgcgcaaaaagctgcgggcggcgctgggctacgaccccatccgcaaccgcatcggggaaggctacgagatcggaggagaggtacaatgaaacggttatctctgcaatggcgcatcaccatgctgacggcgctgctcatcgcctgcgcctgcgtgtgcatgaacctgcttttataccgcaccggcgttaccggcatggacgccctcaacggctttatgatgcagtatcagcccggcagcgcggattccttgacaatcgagatcccgcaggaggaaatgtccagcctactggcgcttttttcacaggaagtctacgatgcaaaggtggtttttggacgcaagggctggtgcatcaccgccgtggtcaccatcctcagcgcagccatcgcttattttgtcagcggcagagcgctgaagcctttgcagcagcttgcgcagcaggcgcagcgggtcgatcaggacagcattgccaccgcccggttggacgaggataccgtgcgggaattcgggcagctgagccggtcggtgaaccggatgctggatggtctggcacagtcctttgaattgcagcggcagtttgcgggcaacgcagcccatgagctgcgcactccactggccattttgcagacaaagctggaactgtttgcagaggagcacccggccatggacgccgagaccgccgggctggtcagctccctgcgggagcagctggaccgtctgactgcccttgtgcgcactttgctggaaatgagcaatctgcaatcggtctcccgcaccgaccacattgcccttgcgccgctggtggaggaaattttgaccgacctgacccccctcgcccagaaaaacaacatctccttgcagcaggactgtgaggagcttggcatggtgggcagcgatgcactgatctaccggctggtgttcaatctggtggaaaacggcatcaagtataaccgccccggcggtgcggtgcgcgttaccctgcggcaggaaaagcaggccgccgtgctgcgcgttgcggataccggcccgggcatccctgcggactgccgggagagcatcttccagccctttttccgggtggataagtcccgcagccgggaaatgggcggcgtggggcttggccttgcccttgtgcgggagatcgccgtattgcacggcggcagcgtgaccgtggagagcagcagcgaaaacggcactacctttgccgtcgccctgccgctggcacagccctgctgaaaccgggcggactggggctttatttttggcacacaggggagtatactgaaaacagcaggccccggaaaataagaaggacaaaggagatactgaaaatgcaggcaaccattcacaacgaattcctgaccctgaccgtggacacccacggtgcagaggccgtcagcctgaagaacgccgcaggcgaagagctgctctggcaggctgaccctgccatctggaagcgccacgcgcccattctgttcccgtggacgggcaagctggtggacggcacctttaccgccaagggcaaaacatggaaaggcggtcagcacggctttgcccgggatctggagcacacgctgctgcgggcagaagaggataccatccagctggagctgcgggcagacgacgccattaaggcagagcgcttcccctatgattttgtgcttaccagtaccttccgtctggagggcaagaccgtgcaccacaccttgcaggtgacaaaccccggcaccgaggagctgcgcttcggcatcggcttccacccggcgttcaatgtgccgttcgatgaaaagcacaccaccactgactacgagttccgttttgaccggccggaaagcccggtcatcctcgatgcccgccccaacggcctgctgagcggcaagagttattaccagtggaagaaccagcaggccatcccgctgaccgatgacctgtttgccaacgacagcttctgcatggcaggcctgcgcactggcaccatcagcatctgcgagaaggacaccggccgcaatatcacctgcaaggtggagggctacccctattcgctcatctggtcggctcccgcaaagccggtgcgctttgtgtgcattgaaccgtggcacagcctgcctgcagccgttaccgacccacaggactgggagcagcgcgccgcagccgcctgccttgcccccggcgaaagctggcagaccaccctcagcaccacctttgaccggtaataaaaaagcacgcagaaacgaagctgcgtgctcttgacagaaacctcaaaagtgggtatactgtaaatagaaaaggcactgcgacaagcggttggccctttttgatgtaagttcttaaagactaagaaccgtcaccggccagggtggcggttctcgctttttaccttgatggtaaataccaatccgaagatatggaacgtcaaagtaattggcataagcttcacctcctttcggaagtggggccgaaccgcctgccgttatgtgcagtgccttgctgctagagcagcaactctataatagcatataattcgacaaatgacaagtaaaacccccggagcattttcgtgctccgggggttttgtatcgggtcagaaaggcaaatgcttagtaagcaacaccccagtagaccatggccttggcgggcttaccgcagcaggggcacacatcgctgagctgctcctgctcaaagggcatacaacggctggaaagtccggcctcttccttcatcttcatctcgcaggccagatcgccgcaccacatggtcttaatgtagccggtgttagccttggccagctccttcacctcgtccatggtggtggcagcccaggtgcgcttttcgcggttttccagcgcacgctggtacagatccttgcgcagagcctccagctgggcggggatggcggtctccagctcgtccaagcttacaaagaccttctcacgggtgtcgcggcgcaccagcacgcactggttcttttccagatctttggggccaatctcaaggcgcaggggcacgcccttcatctcccactgggcaaacttccagccaggggcattgtcgctgtcgtccagcttcacgcgggcgtacttgctgatcttctcggccagctcggcagccttctcggagacgccgggcttgtgggcggcaatgggcaccaccaccacctgaatgggggcaatggccgggggcaggatcaggccatcgtcatcgccgtgggtcatgatgatggcacccaccagacgggtggaaacgccccagctggtctggaacggatgatgcagctggttgtcgcggccggtaaaggtgacatcgtaagccttgctgaacttatcgccaaagtagtggctggtgccgctctgcagtgccttgccgtccttcatcatggcttcgatggtgtaggtggcctcggcaccggcaaacttttccttgtcggtcttgcggcccttcaccacggggatcgccagatcctgctcgcaggtgtctgcatagcagttcagctgctgctgggtctcagcctcggcctcggcagcggtctcgtggatggtgtgaccctcctgccaccagaactcgcggctgcgcaggaagggacgggtggtcttttcccagcgtaccacgctgcaccactggttgtacttcatgggaagctcgcggtagctgtgcagcacgcgggaccagtggtcgcagaacatggtctcgctggtgggacgcaccgccagacgctcctccagcttgtcggagccgcccatcgtgacccacgccacctccggcgcgaagccattgacgagctcgccttccttctgcagcaggctctccgggatcagcaccggcatagccacattctcatggccggtagccttgaaccgggtgtccaagtccttctggatcagctcccagatggcctgaccataggggcgcaggatgataaagcccttcacactggagtactccaccagctctgccttcacgcagatgtcggtgtaccactgtgcaaagttttcttcctgactggtgatcgcctgcacgagcttcttgttgtcttttgccattttgttatatcctcccaaggccgtgcgccaaacgctgtgcgttccgcacgaaccataataaagccccgtctgcctgcacggccgtgtgccgcactgcaaaggcggggcttttgcctaaaagaatcagttctgcgcgtggctgtccacaaagtttaccacatcgcctacggtgcgcagggactcgatggcgtcgtccggcacctcaatgccaaactcgtcctccagcgtcatcaccatatctacgatatccagactgtccgcctcgaaatcgctcatgatatcgctttccagcgtgatctttgccgggtcaacgtccagctgctcagccagcaatgcacggattttttcaaaagtatccattcctgtggtctcctttttgcagttgtattgcatacgcgtacagcccgccgtgccccggaaaaagcctccggtatccggcacggccttgcctgctgtacaaagcgctctctttttttatatcccatgcagtgcgtattgtcaagccctgttttgcagcaactgaagaaaattgtctgaaagctgctttttcccttgacatctcgtgccggtttttttatcattataaagtaatgagtttacggggactgaccggtcccttttataaggagcgataagcatgaagctttcattcaccaaaatgcagggctgcgccaacgattatatttatctggactgccgcacctccggcgtgccggaggatatcgcagcgctttcacagcggctgtcccggcggcacttttccatcggcgcggacggcattatctgcatctgcgcaccggtcacggccggggcagacgccatgatgcgcatcttcaacgcggatggcagcgagggcaagatgtgcggcaacggcatccgctgcgtggccgagtggctgtacacccacggcatggcaaagccgaagctcgccatcgacaccctcagcggcttaaagaccgttgcccgcatgggcgaagggctgtggcaggtagagatgggcacctacaccgccatggcagcggcgctgcccgccgtgaacatgggcgaagggccgctggtagacctgcccctgcaggtggaagaaaacctgtggcgggtgacctgcatcagcgtgggcaatccccattgtgtgaccattgtgccggatgtggacagcctgaagctggagcagatcggcccgggctttgagcaccacgaaaacttcccggagcgcatcaacaccgagtttgtgcaggtggtggacgccacccacctgaagatgcgtgtgtgggagcgcggcagcggcgagacatgggcctgcggcaccggcacctgtgccactgtggcagccctgaccgagctgggcatctgccccgccggagaggacgtccatgtgcagctgcgcggcggcgagctgaccatccgggtactgcccggcaagcagctgctgatgaccggcgctgccgagaccgtgtgcgagggcacgaccgaagtgtaaataagaaccctctcagtcgcctgacggcgacagctctcccgaagggcgagcttttctgcatcaagaggaaaagtttcccttcaaaatgaaaagctcccccctcgggggagctggcatcgagcggatgcgagatgactgagagggttccacaatatagaagcgagggaaagtatcatgaagatgaacaagcattacaatgagctgaaggccagctacctgttcgtggacattgcccacaaggtggctgcgtatcaggaagcacacccggaaaaggagatcatccgtctgggcatcggcgatgtgacccagccgctggcaaagtgcgtggtgcaggctatgcgcgatgccgccgaggagatgggcaccaaggagggcttccacggctacggcccggagcagggctaccccttcctcaagcaggccattcagggctactacgccggccgcggcacccagcttgccgaggacgagatctttatctcggacggcgcaaagagcgaccttgcaaacctgctgggtctgttcgatgtggacaacaccgtgctggtaccggaccctgtataccccacctatgtggacgataacgtcaccgatggccgcaagatcatttacagccgcaccgggcaggagaacggcttccttggtatgccggacgagaacgtgaaggcagatatcatctatatctgcagccccaacaaccccaccggcgctgcctacacccgcgcacagctgaaggcatgggtggattacgcccgcaagaatgatgccatcatcctgtacgatgccgcttacgagtgctttatctcggacggcgagcttgcccgcagcatcttcgagatcgagggtgcacgtgagtgcgctgtggagatctgctccttctccaagatcgcaggctttaccggcacccgctgcggctacaccgtcgtgcccaaggagctggagcgcgagggcatgaacatcaataagctgtggctgcgccgtcagaccaccaagttcaatggtgtaccctatgtggtgcagcgcgccgctgccgccgtgttcaccgagagcggcatggccgagatccagtccaatctggattactaccgccgcaacgcaaaggtgatcgccgatgcactggacgagtgcggcgtgtggtactgcggcggcaagaacagcccctacatctggctgcgctgccccggcaacatgaagagctgggagttcttcgactggctgctggaaaactgcggtgttgtgggcacccccggcgtgggctttggcgagtgcggcgagggctacttccgcctgaccgccttcggcgatgcggaaaagaccaagcttgccgccgagcgcatcaagaccgcgatcaaggcgctgtaaaacctataaaaaagcacccgctgtccgttttgggcggcgggtgtatttttttgcggaccctcttgacaaatctgtatctactgtatatactgtacatatacagacaaaacgaaagtgtcaaaggagcagccgatggaactgtttatcaataacaaaagcggcgcgcccatctatgaccagatctacaaccagatcaagcagcagatcatcagcggggctttacagccggacgaggccatgccctccatccgggggctggcacgggatctgcgcatcagcgtcattactaccaagcgcgcctacgatgaactggaaaaagagggctttctttacgcagtaccggcaaagggcttttttgtagccccgaaaaacaccgagctgctgcgggaagaaaacctgaaaaagattgaagaacatcttaccgaggccgtccgcctgtccgcatcctgcgggctgagcagggaagaactgcgggagatgctggaactgctatgggagggctgaatatgaacgcactggaactgcaggggcttacaaagcactataaggactttacccttgggccgctggatctgaccctgcccggtggcaccatctgtggcctgatcggcgaaaacggagcaggcaagagtaccactatccggctgatcctagacatggtgcagcgggacggcggcaccgtgaccatcctcggcagggacagccgcaccgcttccgtccgcaccaaagaggagatcggcgtggtgctgggcagcgagggcatccccctgtgcctgaacgcggtgcaggcgggcaaggtgatggcgggcatctatcagaactgggacgctgccgcctatgcggagctgtgccaaaagttcggtctgccggacaaaaagcaatataaggactactccaccggcatgaagatgaagctgtgcatcgccgtggcactggcgcaccacccgaagctgctgcttttggacgaagccaccaacgggctggacccggtggtgcgggacgaggtgaccgacctgctgctggactttgcccgggacgaaaaccactccatcctcatctcctcccacatcgtcagcgacttggaaaagctgtgcgacaccatcgccttcctgcacaagggcagactgctgctctgtgaagaaaaggacgccctgcgggaggaatatgccctgtggcatggcacggcagcgcagctggcggcactggatgcacaggtgtacggcaagcgggtcaccccctacggagtcgaagcgcttgtgcgccgggacgcaatgcccgccggagcagagcttgccccggtaagcattgaggaattgtttgtactgatggtgaaaggggagaacgtgcaatgaaaggtctgttattgaaggatgcctatcagatgtggagctacaccagatggatcattctggcgtcggtagccatgatgctgatgggaacgtttttcatgaaggaagggtctaatttctttatgctgtacggcgggcttttgctggggctgtcgccaatgtccttactggcttacgaccagagcagccggttcagcatttgcagtgccgccctgccggtgacaaaagagcagctggtgggcggcaaatacctcattggtctgtgcggtatggcgctggcggagctgctgagtatggcggcgctggcagcagcacagctgctctggggtacagtgacggtgaagctcaccgtggcgactctgcttcaggtggcgatgctgaccctgctgggcaacattatcctgctgccgttgacctaccgctttggctacgagaaggcaaaatatgtgtattatctttgcattggtatgctgggagccttgatgggcattacggtgtcctccggtgggattttgctgaacagcatcctacccgcccatagctctgcgctggtgggagtggtcgtgctggcagcggtgctggcgctgtatgccctctcgtggcggttgtccgttgcatggtacggaaaggcagagcagtaaaatgaagaaaagtcaggtcgcaggcatcctgttcggcgttgccatgggcgttttgttcagtgtgtcgatggggacagtcggttttgcgctgggcgccggttttgtcggtctgggcatggtgatgtttgaagggctggatgacccgcaggataaaaaataaggtgtaaaaatgcgccgcccctgccggaaaagcttctccggtaagggcggcgctgtatttatttctcgggattttcggcgtttttctgcgcggcttccagctcgtccacccgcttttgcagggcggtaatcttatcgtccattttcaaaaatgtccagaccagaacagccagcaccagcgcgggaggaacaaccatccacagggactgctggcaccagagcagcagcgaatagccgccaaacacagtaaagagaaacacggcaaacaggcttgcagccagcacagcaaaaaatcccatacagaaagtctcctttcgcttattcttctgtttcttcctcgtccgggtccagctcgatgctgaacacagcttttttcagcttgccgcagccctgcgccttcaggccggatttatacggttcccccgccagatacagggcaaagcgtccctcgcacagcatcccggcaatgctggtgccggcggtgcctacagtggtgtcggcggcctcgtcggtgggcttggtgggagtcagctctgccagacttacctcaaacagctcgctgccgtccaagtcggtctccagcgtgatgtgattgtcgtgccgctggaacagtgccttgtcggaggtctggggtgtgacggtactcacagtgaccaccgccttgtccccatcgatgcgggtgcgcccggcaggcagggtggtgatatcccgcgccataatgtactcgatgacagtgtccagattgtcgcttacgcccagataattgggcaggttgttcagggtatcgtagatcatggaaaaagtcctccatctgtatcgttttggttacttgtatggtatcacaggtcgggggcagatgcaatatctgtgggggagagtataaatcgatattgctcgaatctccccttgcatcccttttgcatagcagataaaacagaaactccagtacccggttcggatattggagttcttggcgggcgcgggtggattgcgcgagccgcgctgctaaaaacagcccactgggctgtttttgcgccgtcttcagcgccgtcgccgcagctgttcgaatccacccgctctatgagtttagccttgttgcaaaacaaaaacctcagcgcacttgcatacgctgaggttttttggtgggcgcgggtggattgcgcgagccgcgctgctaaaaacagcccactgggctgtttttgcgccgtcttcagcgccgtcgccgcagctgttcgaatccacccgcatttgtgagtctcacgcacaagcaaaacaaaaaactccagcgtgctaaatacgctagagcttttttggtggagcgaagcaacccaaatccgaaccattgccctctggggcatctttggcggcaatttcatcgaaagtgatggtttttgtgccgtctttgtagttgaatgtaatcaaaactttttcatcatagagataaacagcgttcacgaatgtattgataagcgtttcccggtggcttttcacgttcgggtcgagcttgcggaaccgggtcagccagaaccgaacctgattttcactcaaccgaggccgagcgattttttcttcggcaatccgaacctcaagttctttctgctgggcttccagcttttccaaacgcgacttggtggaattggtcagcacacccgcttggatggcgttcagcatattttcaatgccattctctacctcacgcatctgcttttccagcaatgggagcgtggtgttttcctgatcctgcaactccatcacttccgcaacgatggcatcaatcacggcatcatcctgaatcagcttcatggtttcagctacgaccaaatcttccagccattccttacggacggtctttttcttgcaggtcttgaaacgcttcgcggtggcgcacttataataatgatgaacgaccttgtttctacccgtaccgcactcgccgaacatcatcgcgccgcacattccacagaacagcttggtggtgagcagataatcatcctcggccttgtggcgggcaggagcacggctgttctttttgattttcagctgcacttcctcaaacaaatccttgtccacgatggccgggatgctgtccggcattacgatatccttgaagtggttttcaccaatgtaccgtttgttcgtcagcagagtctgaacactgttgtaggtaaacttctgattgcggttggtggtcacgccactgtcgttcagccagttcatcagttctttcatggtcgcgccctcattgtaccgccggaaggcttctaccacaaagggagctttcagcgggtcgatttgaaagaacttctcctcgtccaccttgaagccaatgggaatcgtgccgccgttgtacttgcctttcagcacattctcagtcatgccgcgcacaactttttcagaaagctctgccgagtagtattcagccatgccggtgagcatactcttgaccatgatacccgcagggctgtcagagataggctccgtggcagataccagcttgacatgatttcgttccaactggtactcatagtgggccgaatcataacggtttcgggcaaaacggtcaagtttccagaccagcacaatgtcaaacaaccgtttctcgctgtccttgatcatctgctggaaatccgggcggttgtcggttttggcggaaagggcacggtcaatgtagtgtttgaccacagtgatgccgttcttttcggcgtaggccgtacattcacgaatctggccttcgatggattcctcacgctggttatcgctggaatagcgggcgtaaatcacggcggtcatgcaaacacccctttcacttcattctccgcagacggcgcacaaggtcggatgcactgtacagcacacgagccacagacacggtattctcgcccacgatgtagaacaccgagtagttgtccaccagcatctgccgcagcccttgggtgcgctccggctcgctttccaccagcgcacagcgttccggcaggatgttcagcgattggatggcttctgcaatgcggttgtactgccccatagccgtatcaggttcaagcagacggtcagcaatgtagctgtaaatctgttccatgtcgctgagggctgtatgggaaattttcacgtcatactgcttcatctgtgctgttccctgaactgtgcgaatgcgcttgcggcatccacggtatcaccgttctgaatttccttaatgcccacctgcaaggctgcatggagctggtcatcggtcatggtgtcagcgttcagagccgcaggagccttcggcagggacagagagaaggggatgccgcccgtcagcgtgatttgacgcaggtacatatcaatggcggttgccatcgggatgccaagctgcttcaacacatcctcggcttgctgcttaacggtggggttgacacgaagattgagtgtcatcgttttttccatggttatcacctcggccttattgtaacgtattttgcgttgcaaatcaacaactcccaaacttataattaaatttctccatattgcacaacataacttcaggttctccgacttctaaaattttgcttcataccaataccaatgtgctgcaattcgttcagtatattgtgtattatcaccttctgattctgcccacgaccatccatttccactttttacaaactcaaccggaacatcttgaaagccatgtggttcatcatcttcagaatagtaaaagcccttatatgtagtactcggaatgagcccgaaagagcctgtacaaaattccaccatatcatctgcgtaataatatactttccatccattccactctagcggtcccattggatgttcttctatcactttccgcgcatagtttgtcagctcatcctgatttcgcagtacataagactggatggattttttgctaaatggccgaacaatcaacgccgtagctacagcaatacaccctagtgcggtcaaaagtccaatgcaaattcttttcatgtttttctccagtcaactgaaaacatatcacgctgtaagaactatgatatcgcagactttactttagcgtgtgtacaatatgcagtgccatatctgcattttctttgtctacaaatatctctgtgatatactttggttttatacctagagttccaattcttgcctgatcgaacgtattacgccgattgacatctttagttttgcaatagaacttgattcccgcagccgccaacgcatccgtgatgcgactgccttggtagggatcagaaacggttgcgacttgcgatttgaaaaactgctctagcataaaaggatctcctatatacactctaaaagaaatctcttgcgtttcttactggaataacgaaatttaagcccaatttatttcgtttgtctacaaaatttttcaaaatcgtatagctgcacataaattcatggaaaatttgttgcataatcacagttttgtttatctgcatcgctattgaggacgaatacggcaatactccaacgcagcgggcggaactggactggctgctctacaacaagcccttggagtatgctcagcttgtgctgggtggtgagattgagcattatctctcactcagctgtgaccatggcagatttagaggattgacctttaattagaatatacagataaaaccgacagccatctacttgcgacttgcaaatagatggctgtctattattaactacgcattttaacaatgatttttcttttcaacaagcattccgataataaacgaaagtaggaaaacgagtagccaaatcaaaactccgtagtgtgccttgagctgccatatttttcctatatacatatccggcgtgatttttgtggtgtttattttgataataaaatcgcccaacacttgtccgatcaaaattcctgtccagtttccagctgttgtgataagagctgctctatacatttccagaaaacagaaagtaacagatgcaacccataaacacaaataataatgggctgctgtccattcaaacaagtagacttcatgaaacactgtttgagaaagaagatagcacaccacatatgctaaaaatacgatcagcaaaaatccgagacaagttttcttttttgatgctgtgttcttcatacggcttttgaatcctattccaatgtgtaccgacatctttgcgtttcattataaaacagcttgtctgcttacttcgatactatttcgacagttggcatcttgccttccaatccgagttcgtcatcttctgcaactctataactggtaacatttattgaatacatataatctgaaatatttggattttcttcatcgtctggaagttcaacttcaaaagtctcaaactcaaacacataagctgttccttcaataagttcaccagttaagtctttctggaaatgaagcaaaaatggtctgtcctgaaagaagtgaacaaccgcaaccgtttttcccggcagtgcatagtaatcgggcaagatctgctcaacagtggccgtaaaagaacccgaaaaccgtgcaaaatgtttttcatttccggttgcttgctcttctccgtcatgatacccggcctcgtagccagcggtatagccttcttcgtattctgcattgtgctcatctgaactttgagcattatttccacagccaatcaatgtaaataccagcgcaaggcaaagaactattatagccttctttttcatacggtttcctccttccatgtttttcttcgcctttatcggacttttccacagcttttgcaaaatcgtcgagaaaaagttctgtatctttttcattcgtaccactttaccccattattagaattgaaaattagtagccctttgatataaataagtaaacgatgaatccaccccacaaaacaacttcagcaattatcaaacacttcaagtgttgctgcaatttttcggggtcaatttcgccttttttcagaaaatcataaattgaatttcgcaatttatctatgtcttcctgcttgatttccagtttcaaataaaaatttttcccgaaaaggagctggtgcatcccataatatattgaaagcaatattaaaaatgaagtaatacttacaagcgctggctgggtccagcttattgtcataccttctaccgatgtaagatttctataaaaaacaatatcacttaaaccagctacaaacaacagaaaattccaaaccaaaaatgtatataaagttttcttcattttctataccttctttcactactgcccacattgctggaaatatcaaacgcctactttatttttatgccctcattttttacaaatcatcaaaccttcccgccttgcttttttgtttagataacgaaatttaagcctgatttatttcgtttgtccacaaaatttttcaaaatcgtatagatgcacataaacttcctggaaatttgtagcacaatcgcaatcttcttttaaataaacacgctataaggataaactttttgttttacctcgattgaaagccatctttagctttctggtttgagaactgtacttcgggccggattctttgggtctactagaatttttattggtgcccctttcggaatacatggattgaaccaaaaccactgcgactttccattataggtttcacctttaactttatactgataatgtaccacatatggatagattacatcttcatcggcaaggtggtaggtactcatatgaaattttatatgtactcgttttgttgctgtaacctttccgatgattcttgttccatttttcaaaagttctgcctttttatagtcggaaataatcgccaatccgataattatacctgctacaatccatgctaatatcgcagccacccaaataccagacttacacgctccaaccgatataattgccgccacgaacattccgacatatgccagtgtatgaataagatcttttgaaaaaaacattttatctcgtgtaattttcataaaacggcatcctcctcaaatcctacagtcggtaatcagcagcttcgtgaaatcaacgttccttagatacttagatttaatcctattttgtttcatccgtctacaaaattcctcaaaatcgtatagctgcacataaatttccagaaaacttgtagcacaatcacgatttttcttttcactcagataaaccaccacggcaattccagccacaggttatccatagcctgttcctcggtcttttgggcgcggccttttgtcaggtggaaatatatcgccgtaccaatcaaaggatgttccttgccatcagtaaagccatagcggtacagcagataggtctgctcccgctgggtcagccgtttcagaccatcgtacagttcccggcgcgattcctgttcctccataatggtctgcggctgcatggcataagggtcggctatggcttcgatgcgccgcagttgttcctctcccggcagaacatcgtccagcgaaacgcgctggtagcagataccgtccttgtcctccgttaccatccgctgctcaaaagcggcaaaggcatcccgcaccatgtccatcatggcgttgcggatggcaggagccgcataggtcaggaacttcatgccgcgcgctgcatcgaactttggcacggccttccacaagcccatattccctgcctgtttcaaatcgtccgtgtcaagattcagaccagcctgtgccagattcatgctgcgaaaaaggtcattcgccaccttgccgataaaggacttgttgttgtcgatcaggctgtccagcgcagttgcatcgcctttctgtgccagcgcacaaagccgttcattcgtctgcttcatgggcgttttcctgctctgcggcagactgcaagattcccagcaggccgttccgcagctgttccagcgcttccggcgtagctccttccatgcccgaaacgctgtccaacattgcatctgtcaactgctctgccgtaatcgttgggtgctgcacatcctgccccttggtcaattcggtgaacatcttctctgccactttcttactcatagcttcctgttcggcgtaatggctcccaatgccctttttgatttccttgaccgccgccataaagtacatttcaatgtcatcaaggtcaccttgatacaccggctttttccgtgggctgatgtcctttgcggctttggctgcttccggggtcttgacctttgtgcgcagcagggtgttcaatgtcgtgagcatggcattctgtgctgcgatgccggatgcaaaggtatcatcaaaatactgcgctatgcggtaagtaagctctgcaaagcgggcattttccagcagcagattggccacctctgtattgacacgtcctatgtagaggttctttgcagcttctacggacaagcccagctcggcaatgtcgtagttcttgcggtcagggatgttggtttctcccagcaggaaatccgtagacacattgaacagccttgcaatcttcagtacctgctcgtgggtcagggttccttttgcgccactgatgaagcggctgatggtgcttttggagcagccgatttccttggcaagctccggttggctgatattgtgctctttcatcaagtccgcaagacggacgttggacggtgcgggcagatattcctgtgccatgtggtcggccctcctttttgagctttttcctcattataatatgctctgccgttttgttcaatatacgttttcctctctgcccttgctgttgcaaatctgcaaccagtaagggcttttttctttttccgttgcagttttgccgcttttttgctctttctgcaaaattccccgtatattcaggcaggaaacaaaaaacaccagagttcccactttggggtctctggtgcaacgcacgaaacaaaggaggaatgcccttgagcctgtatcaaactgtcaagtccgccatcaccgttcggcaggtgggagagatgtacggcatggagcccgaccgccatggcatggtgtgctgtctgttccattccgacagcgaccccagcatgaagctgaacgacacctattattactgcttcgcttgcggagccaacggtgatgccatcgacctcaccgccaaactgttcgacctgaacccccggcaagccgccgagaagctgataaatgacttcgcgtttgcgaagcaatgcagtccccagtggggactgcaagtgacagagcggtcttgcgtcagcaagatggaggggccccgccccgacaagctctggcttgacccggacaagccgcctgccaatgccatcgctctgccgccgcccaagcgtggcctgacggacgagcagtgggcagacatcgcctactgtctgcgggtgctgaccgactatctcgacctgctgcacgactggcaggagcgctacaagcccgccaccccggaggagccgcatgacccacggtttgaagaagccctccacatgaccgagaccgtcgagcacctgacggactgcgttgcatttgggacgccccaacagaaggccgatgccgctgcacggctgctgtccgggtcgtacctgctgatgctggaggagcgcaccgaccgccttgctctggcaaagtgcgcctaataatttattcacccgaagtggtgggtctcaccgtgagacccgccacttcacttttctaaaggagaaccaccctatgaagaaaaacatttcccgcaaccccttatggccggactggtacaacggcaagaagatcgatgaagtccagtttggccgcgcctttctggaacagtggccgctgaaatgcgtcaacggaacgctgtacacgctggacggcccggtggaggacgaaagcgagatcaagcagcgcatcttggagaacatcgaggaatatgtcacctccggcctgtccaaaaaggtcaccaacattctggagaccatcaagctgctggccttttccgacccatttcccatcgaacaggattgcatccacctccagaacggcgtgtaccatctgccggacggctcttttcaggagagccgcctgttctgccagaaccgcctgcctgtgaggtatgaccccaaagccgccagccctgaccgctggctgacctttctgcacgagctgctggacgatgccgacctccccaccttgcaggaatatctgggctactgcctcatccccagcaccaaggggcagaagatgatgctcattgttggcaagggcggcgaaggcaagtcccgcatcgggctggtgctgaaacggctcatgggagatgccgccagcaatggcagcgtccagaaagtggagaataaccgttttgcccgcgccgatctggaacgccgcctgctgatgatcgacgatgatatggatatgaacgccctgcccaagacgaattatattaagaccatcgtgaccgccgaagccaagctggacttggagcgcaagggtgtccagagctaccagcgggacatctacgcccggtttctctgtttcggcaacggtgcgctgacatcgctgtatgaccattcggatggcttcttccgccgccaactcatcctgaccaccaaggacaagcctgccgaccgcacagatgaccctttcctcgtggagaagatgtgcgccgagttggagggcatcctgctgtggtgtctggaagggctgcaccggctggtgcagaacaacttccgtttcacggtcagcgaacgtgccgctgccaacgtggacaccatcaagcgcagcagcaacaatgtcattgacttcatggaatccgagggctacttccgctttaaggcagactactccatcagttccaaagatttctatgaaatctacaaactgtggtgcgaagataacgcctgtcacagcgtatcggcgatccgtttcagcgcagaactgcgccagaatgaccgtcgctacaaccttgaagccaccaacaacatctacctgcccggtggccgcagggtgcgtggtttcgtgggcattgagccgcttgtccacccatgcccgtaaaaagtgcattttttcacggaagaagttcgtacaacctgtacggtctgtacttgtacgcatctgtacggcgaattaaagcgttttaaaacgtgttatcgtttatatttcgcatttccgtacgtcgtacgaaccgtacaggttatttgaagtccgtacgcgattttttcagatgcgtacggagcaatcaagttcgcattgtgcgaacttgtcggggcgaggcccctccatcttgctggcgcaagaccgttcggtcacttaaaagccccactggggctttcattgcttcgcaaacgtgaacttgattaactctcccgcaggagacgttttccctcggagagtcctcgaagagcccactacactttgcagcccatagggatgaaagtgttatagtgggttattacacttccgaagaagtgcatcttcgttccccgtcacctttcgatgaaccttgaaaggagggatgccctttggcaagaaacgatggcgttgaccgcaccagtgtccggaatctcgccgtttcggacaaggccgttggcaacacccagcagcacaacgagcgcgaaaaggatagctatcgaaaccccgacattatcccccagcgcgctgcatggaacgtccatttcaagaagccaaccgccagctacaccgacctgttctcccaactggaagccgatggaaccatctccacgcgcggcctgaagccggatgccacccactactgtgagcttgtctttgatgtcaactcggcctactttgacaaccacggcggctacgagttcgccaagcagttctatgaggatgcctacaaagcagccgttcaaatcgtgggcggtgagcagtatattctctcggctgtcatgcacgccgatgagatcaaccgcgccatgaccgaagcactaggccgcgaagtttaccactaccacctccatgtggtctatgtgcctgtggtggaaaagcagatcctctggtcgaaacgctgcaagaacaaggcactggtcggcaccgtcaaggagactgtcatgcaggtcagccggagcaagaagtgggcatccaagcccctgctggacgatgctggagagcccgtcctgcaaaagaacggcaaaccagtcctgaagaagtcgtacagcatcctgcaagacgatttcttcacctatatgcacaatgccgggtacaccgatgtagagcgcggcgagcgcggcagcaccgaagaacacctgaccgtcacccagttcaaagtccagcgggagcaggaacggctggacagcctgaccgcccagattgaccagaaagagcagcacctcatccaaaccaacaaaaccctctccaagaccgaaaaggaacttgccgctgtgcagaaaaaggctacgctcacaaaagaagccctcattcatgtgcgcgatctggattatatcggcaagcgcaccttcctcggcaactattcgctgaccgaagaagaattttccatgctgaaaaaacaggccgaccatggctatatgatggacgtggagaaccgccgcctgaaagaagaactttccaccgccaagaaggaagctgctcattggggccaaaagtatcatgaactctggtacgaagtgaagccctatctggatgcgctccaccgtgcgcctgaactggtgcgcagctttctggaaaagattcttgcccccaagcaggagcgcaccatgaatgagcagcagaaaaaccgcaagcgtgggcaggatatggaactttgattttcggaggatactatttgaataaaaagaagaagtcaaacaaatccggctacccggatgaagcaatcaaaacccttgcacgttgcttttatccctccatggttgagtttttcaacagtgaggaaggccagcgtgaatatgaggaatggctgaaagagcaggaagttctacaagccttgcctgttgcagcataaaaacagcaggacgctcccagtaaagggaacgccctgccttatatagatgtatctcaccgaggtgtgtccagttgggcacacctcttatttttttgcccttaatcttccaatccatggctcccagccacattcttcaaatattccttcggatcgccattcagaatcaaatcggcatacgccagcgggtcattgtagatgaggtagtccaattcggtctgctgtgccatggtcacgtccagtgcatcctcgaccccggtgcagtcaatggagatcattcttccatcccggagcagcagctccacgcacccggtgtccatgttgaatttgcaggctctttcatcgtacttcataatcataccctccaaatcttgttattggcttacggtctatgacaaggtatcggagttttacgccgtccacgggagccttcgttctcaaacccgaagaaaacgaaaaatccgaacccttctccaatcggaaacaggttcggatttttcttgtttggtgggcgcgggtggattcgaaccaccgaagctgaaagcagcagatttacagtctgtccccattggccactcgggaacacgcccatattcttttttacagccgcgcggactgcttgtatatgttaccactgaaaacgcggtttgtcaacccataatttgggctgagcgcaaaaaataagaaagaaatgcagcaaacacaaaagccctcccgtccgggtgtgctttacagcgtccgggcgggagggcttttcagcctgacaaaaacaggtcaggagaagatcacttctggttcttcatgtagatgtggtgcggcagaccggcgatgtacagcggggtcagctcggcctggatcagcggacgggcgtagtccaagaagtcctcggtcatctgggtgtggttgttgttcatccagctcagggggaccttcttttccaagttggcgacctcgctgatgggatgcagctcggtggtgcactggtaggggttgttggagatacgcttcaaagccaccatctgaccggtgacgccctcaaaggctgccttggcagcggcaccgcctacctgataggcttcggtgatgtcggtgcggctggtcaggtgaccggcgcagcgctgcagggtggaaagctcgatgcagcgggtcttggtgtccagattgcgggcaaccacattggccagataccgtgcagtaccggtcagtgccttgtggccgaaagcgtccactgcgtgcacgtcgtccgccagctcacagacatagcggccgtcctccagctttacgccctcggaaacagcaatgacgatgctgggcttcttttcctgcatcacacgcaccttttccacaaagcgctccacattgaagggaacctcgggcaggcagatcatgtccacgccctcgcaatcgtcgctcttggccagtgcggcagcggcggtcagccagccggcgttgcggcccatgatctccaccacggtgacgtacttggtgccgtacacggtggcgtcacggatgatctccttcatcacaacgccgatgtacttggccgcagagccgtaaccgggagtatgatcggtgaccatcaggtcgttgtcgatggtcttgggcacgcccataaagcggatgtcgctgccaacgcgctggccgtagtctgccagcttgccgatggtgtccatggagtcgttgccgccgatgtagaagaagtagccgatgttcagcttttccagaatggcgaacagctttttgtacaccgcttcgtcatcccgccagtcgggcagcttgtagcggcagctgcccagaaagctggacggggtgcgcttgagcagctcgatgtccaggtcatcggtcagcagggtggaaagatccaccacccgctcctctagcagaccggcaacaccgttgcacataccgtacacgatgtctgcgccgcggttcttgcagctttcaaagacacccgccaaactggcattgatgacagaggtggggccgccggactgaccgacgattgcgttttttcccatgatgatttctccttttttgttttttctgtttcggctataaaaacgtgcagttgcacgaaaacagacgcggaagggaaagggagattacagacggatgtggcggggggtaccgttcacatacacaggagtaacctcgtccaggatcagcggacgggcgtactcctcaaaggcttcggtcacctgcatcccgtccggagtgatccattccagcgggactttcttttccagatttgccacctgctgcacatccacagactcggtgatgcactggtacgggtagttggaaacgcgcttgagggcgatcatgcggccgctctcgcccgcaaaggcagcagcggccgcggcaccgccaacggcgtaagcctcgttcacatccgtgcggctggccagatggctggcgcagcgctgcagggtggagaactcaatggcgcggctcttgcactgcagcttgtcgtggatgagctccgaaaggtaacggctggtgccgctgaggatggccttgtgaccaaaggcgtccagctgcccggcggtggaaaccagatcgcacagataagtgccgtctgcggtctttacgccctcgctggctgcgatgataacgttggactttacccgctgcagctcgtccacccgggcaaggaacttgtcctgatcaaagggcacttccggcagcaggatcaggtcggggccttcacagtcctcgccgcctgccagacaggccgcaccagccagccagccagcgtggcggcccatgatctcggccaccgtcacgctgcggatgttatacaccgaggagtcgcggatgacttccttcaagatggtggcaatgtactttgcggcagagccgtagccgggggtgtggtcggtgagacacagatcgttgtcgatggtcttgggcacaccgatgaaccgcacactgctgcccacctgctgcccgtagcgggacaacttcgcgatggtatccatcgagtcgttgccgccgatgtagaacacggcgcagatgtcgtacttgtcaaacagggtgaacagcttgacgaacggggtggcatcggtgcccgggtcgggcagcttgaagcggcagctgcccagatagctggacggagtacgcttgagcagctcgatgctcatgcggtcgtccagcagaacgttgagctccagcagctcctccttgagcagaccttcgatgccgtacttcatgccgtacaccttgtctgcacccagactgcgggcggctttgtatacgcccgcaaggctggagttgatcacggcggtagggccgccgctctgaccaatgatgatattcttggccatggaaacctccttcagatcatttaaaatgtatcgctgccgggcaaacggttttccgcaccgtccggtaaagtagtctgtcgaccctgcactgccaacagaccggaacggcaaaacagccgcctgccgcaactgacacaaaaatatttgcagcttgtgtatttgctttttgtaaaatgtgcaaaataagctgcaatcctattgtacccgttttgcctgttgtatgcaagacccaattggttgcacaggcaaaaaaaatatgataaaatgggtgcgcactccaaaattaccgggcagaagtacctgcctgttgggataattgcagaaagctggacagagattatgggcatttcacacgaatatcattcggcaccccggcggcgcacgggcgggggcatcagcggcaaactgcggctggcaggggtcattgtggtcatcctgctggtcgcctatgcggtgaccgctattctggaaaagggaacagcggcggaggacagcaccccgcagaccagcgcgggcggcattgcgcagaacattctggcgccgctgcccatgcagggcgagacggactccggcagcgagagcgcagcaggggacagcggcacggcgcaggcggtacagctggaaagcttcggccctgcccggcagactgacggggcctataccattaaggcgtatgacgccaatgttatccggcagccgacctgcggtcaggtagacctgagctatttttcggacgctgcctttctgggcgacagcctgacggtgggcttttcggactatcagatcaatctgagcggcgcgctcatctgcggctatacgggtgtagggccggacgccatcgtcaaccgcgccgccgtcaagagccccacccgcgggcaggaggtggcactggatgtgctggcagcggcgcagcccaaaaagctgtatatcctgctgggcaccaacaccctgaccaccttgggcgctgcggaccgttttctggcatactacggacagatgctggacgagctgcgccagacgctgggcgaggactgcattatttatgtacagtccatcccgccggtacggcctgcggcagcggaaaaaaagccgggtcttgcctcggacgtgctgcgcagcgtcaatgagcagctggcgcagctggctgccagcaagggctgcgtttatctggatctgtgggaggcactggctgacggcgagggcaacctgaaagagatgatcgctgcaccggacggcgtgcacctttcggccggcaacggctacggcgcatgggttacttacctgcgtaaccacgcgaaatattccgcaagtaacccgtggatcatgggcagcgcatacagcgcagaataaccagagcaaaggacagctgcaccaaacgatgcggctgtcctttttttgcgggttcagcgggatgtttttgcacaaaacagtcttttctgcatggaaaaggctgtctgccaaaaagttttagttgacagaaaaggcgaatcatgttattcttttgttgattttgagagacaccgccttgcagagtcttttcaaagcaatttactcgggaccgcccaacggggctaaggccatacggacagccgggtccactgccgaccggcggcgcaagctgccattattgattgagttactgcgagacaacgatgaaacgggtttcaaaccttgcgttggctcgcgtgccgcagcactgctgttttgattagaagcagcggctgcccctgcggcaaagctctaaattttataagttggttcctttacaaccatgaaattgcgcagcctatgcgcagacttgtgaaacggtcaataagagtagtaaaagtgtagttgctatatagactctcatcaccccgtctttttggatcacagataacgcgcagcaccggcacttatggctgggtgctttatcagcgcggaaaaagctgttccaagcgcaggtctgcacatttgtgcagtgcctgcgcttttttgttgtgcaaaaagagaacagggacggaggataagatgaacgagaacaaagcgcgttcccggctggaccagcgccgtgcgcccatttacgaggcgctggagcggttccggcagatgcgggtggtgccctttgacgtgcccggccacaagcggggccgcggcaacccggagctgaccgcttttctgggtcagcagtgcgtgggcgtggacgtgaacagtatgaagccgctggataacctctgccatccggtgtcggtcatccgggaagctgaggagcttgccgccgatgcctttggtgcggcacacgcctttttaatggtaggcggcaccaccagcagtgtgcagagtatggtgcttaccgcctgcaagcggggtgatgagatcattctgccccgcaatgtgcaccgcagcgtgctgaacgcgctggtgctgtgcggcgctgtgccggtgtatgtgaacccggaggtggataagcgtctgggcatctcgctgggcatgaagcgggagcaggtggccaaggccatcaaggagcaccccaacgccgtggctgtgctggtgaataaccccacctactacggcatctgctccgatctgcgtgccatcgtaaaaatggcgcacgacgccggaatgctctgccttgcggatgaagcccacggcacccacttctactttggcggcggcctgccggtgtctgccatggcggcaggcgcagatatggcctcggtgtccatgcacaagagcggcggcagcctgacccagtccagcctgctgctcatcggccccaatgtgcatcagggctatgtgcgccagatcatcaacctgacccagaccacctccggcagctatctgctgatgtccagtctggacatctcccgccgcaatctggcgctgcggggacggcaggtgttccatcaggtggcggacattgccgagtatgcccgcgaggagatcaacgccgtaggcggttactacgcctttggcaaggagctgtgcaacggcgattccgtctttgactttgacaccaccaagctcagcgtccatacgctggatatcggtcttgccggcattgaggtctacgatatcctgcgcgatgagtacgatatccagatcgagttcggcgatatcggcaacatccttgcctacctgtccatcggcgaccgtccgcaggaggtggagcggctggtcagtgcactggccgagatcaagcgccgctaccgcaccgacggctcgggtctgctgagtcaggaatacatcgaccccgtggtggccgccagcccgcaggaggccttctacgcccccaaaaagagcctgcccctgcgggagaccgagggcatggtgtgcagcgagttcgtcatgtgctatcccccgggcatccccatccttgcacccggcgagcgcatcaccaaggagatcttgaactatatcgagtacgccaaggccaagggctgcagcatgaccggcccggaggaccctgaaattttgcacctgaatgttctggcataaggagggaaaaagatggaattttggttttcagagtttcacaccccggatgtgaagcacagcatccgggtgaacaagcagctctactccaagcagagcgattaccagcgcattgatatctttgagaccccggagttcggccgggtgctcacgctggacggcaacgtgatgctgaccgagcgcgatgagttcatctacgatgaaatgatcgtccatgtgcccatggcggtgcacaaggaagccaaggatattctggtcatcggtgccggtgacggcggcgtggtgcgggagctgacccgctacgaccgtgtggagcgcatcgaccttgtggagatggacccgcaggtggtggaagcctgccgcgcctatctgcccggcaatgcctgccgtatggatgaccgccgggtgcatatctactttgagaacgccttgaagtatatccgccgttgcgaggaagagtacgacctcatcatcgtggactcctccgaccccttcggcccctccgagggtctgttcacccgcgagttctacggcagctgcttcaacgccctgaaagaagacggcatcatggttaaccagcagggcagccccttctacgccgaggacgccagcgccatgcagcgcagccacaagcgcattgcgtccaccttccccatcagccgggtgtatcaggcacatatccccacctttgcggcggggtactggctgttcggctttgcaagtaaaaaatatcatcccatcgatgatctggacgcagaatcgtggaaggcgctgaatatgcgcactcgctactacaccacaaaactgcatatcggagcattctacctgccggcttttctggaggagatgctgcgggaagtggaggaacactgatgcaccccaacgttgagacctttatcggctgcgacagcagctaccgcgccgccagcatcgtgctgtacggtgcgccttacgattccaccaccagctaccgccccggtgcacggttcggcccggcggccatccggcacgagagctatggtctggagacttacagcccctaccagaacgccgacctgaccgattttgacgtgttcgacagcggcgatctggagctgtgcttcggctccagcgagctggcgctggccgatatcgaggcccgggcagaggaaattttgaaggacggcaagttcccgctgctgctgggcggcgagcatctggtcacactgggcgcggtgcgggctgcggtgaagaaatatcccgacctgcacatcgtccacttcgatgcccacgccgacctgcgggacgactatctgggcgcgaagctgagccacgcctgtgtgctgcgccgctgccacgagctggtaggggatggccgtatccatcagttctgcatccgcagcggagaccggacagagttcgagtttgctgctcagcacaccgagatgcacaagttcgattttaccggccttgccgagctgaccgcacagctgtgcgagagcaaggtgccggtgtacctgaccatcgatctggactgccttgacccctcctgcttcccgggtaccggtaccccggaggctggcggcgtaagctttttgcagctgctggatgccatccgcactgtgaccaaggccaacatcatcggtgcagacctgaacgagctggctcccacgctggacaccaccggcgtttccaccgccaccgcctgcaaggtgctgcgcgagaccctgatcgcgctggacaagggctggccgggctttcaggtgtaaatacgaaactaccattttacagataaaggagtaaccgatatgagcaaagttctgatcatcggctgcggcggcgtggcctccgttgccatccataagtgctgccaggtgcccgaggtgttcaccgagatctgcatcgccagccgtaccaaggcaaagtgcgataagctggctgccgagctggctcccaccaccgccaccaagatcaccaccgcacaggtggacgcagacaaggtggaagaggtcatcgccctcatcaaggcttaccagcctgatctcgtgatgaacatcgccctgccttatcaggatctgaccatcatggacgcctgccttgcctgcggcgtcaactacatggacaccgccaactacgagcccgagaacaccgacgatccggagtggcgcgccatctacgaaaagcgctgcaaggaggctggtttctctgcctactttgattacagctggcagtgggcctacgccaaaaagttcgaggaagccggcctgactgccctgctgggcagcggctttgacccgggtgtgacccaggcatactgcgcctacgccaaaaagcacgagttcgataccatcgacaccatcgacattctggactgcaacggcggcgaccacggctatgcttttgccaccaacttcaaccccgagatcaacctgcgcgaggtgtccgctcccggcagctactgggagaacggccactgggtggagatcccggccatgagcatcaagcgggagtacaacttcgatcaggtgggcgacaaggatatgtacctgctgcaccacgaggagatcgagtctctggcaaagaacatcccggaggcaaagcgcatccgcttcttcatgacctttggtcagagctatctggatcatatgcgctgtctggaggacgtgggaatgctgtccaccacccctgtcaacttcaacggacaggagatcgtgcccatccagttcctcaaggcgctgctgccggaccccgccagccttggcccccgcaccaagggcaagaccaacatcggctgcatctttaccggcaaaaaggacggcaaggataagacctactacatctacaacgtctgtgaccatcaggagtgctacaaggaagtaggctctcaggccatcagctacaccaccggcgtgcccgccatgtgcggcgcgctgatgctgctcaccggcaagtggaacaccaagggtgtgcacaccgtcgaggagtttgatcccgatccgtatctggatgcactggacaagtacggcctgccccgctccgagagccacgacccggctctggtggactgatgcgggtgcgcgacagccgcccgccctttgcggggctggcaaacctgtccgaggagcagctgcaccgcctgcccaccccctgctatctgctggacgaagcccagctgcgccgcaacggcgaaattctgctgggtgtgcagcagcgcactggctgccgcatcctgctggcgcagaaggctttttccaacttcaatgtctaccctgtgctggcaccctatctggcgggtaccgaggccagcggcctgtacgagagccgcttgggcagggaagagctgccggagaaggagaatcatgtgttctgcgccgcctaccgggcagacgagtttgaggaattactgcaatacgctgaccatatcgtgttcaactcgcccagccagctggcaaagttcggcccggcggcaaaggcagcgggcaaaagcattggtctgcgcatcaacccggagtgctccacgcaggaaggtcacgaaatctacgacccctgcgcacccggcagccgtctgggcaccacccgtgcccagtgggacgccgctgtggcggcgcacccggaactgcccgccctgctggacggtctgcacttccacaccctgtgcgagcaggacgcggatgcgttggcggtgacgctggtagcggtggaggaaaaatttgcagacctgctgcccaagatgcagtggctcaacttcggtgggggacatcacatcacccgtccgggctacgaccttgctacgctggaaagctgcatcctgtcggtgcggcagaagtacggcgtgcaggtgtatctggagcccggcgaggcttgggcgctgaacgcgggctatctggttaccaccgtgctggacaccctgcacaatggagataccagccttgccattctggatatgtctgcagcctgccacaccccggacgtcatcgagatgccctaccgtccgccgctgctggatgccggtgaggcaggggagaaggcgtgcaccgtccggctgggcggccccacctgccttgcgggggatatcgtcggggattacagctttgacgttcctcttaccgagggggataagctcatctttggcgatatggccatctacaccacctgcaagaacaacaccttcaacgggatgcccctgccgcccatctggctgctgggcgcagacggcagctgccgggagctggtgcatttcggctatcaggactttaaaatgcgcttgggcgcgatataaaagaaatagcaaaagggtcatcggcacagcgatgacccttttgctgtctctgcctgatggtgcaattgacaaagcgccggcagaaacatataattgagtttataagaaaactatcgctatagaaccgacaaaagaggagaaacagcgcgtgcgcacattgtctgagatcattgtcaagcgggattattctcaaaaatcgccgtcttccgtattttataaggatagccccttctggcaaaagctgatctgcatctgctatgtgggttttatcgcactggcagcgcttggcgactggaaaaccctgcagagcattttgggtggtttgcctaagattattactgcgggtgttatcggcatggcaattgtctatggattcatatacccggatctggaacgagtaaaaaaggtgttctggcctgcactagtctatatgtccctgatcgcgatgctgttcttgtggtccattgttatctggctgatggacttcagcgcaatctccacgatgatccgggcctgctccaagctgatgttccagagtatttcaattctgacagcggtgagcggagtatttctgctggggtcaaagacgatcgatctgtttgccattgcggcgtgtctggcaaacgcagccatcatggttctggaaatcccgacctatggtctttcagcaagcatccagtcgcttgtgcagtgtctggtgacctttggcgatgcagagggttatgccatcaggctggaaatacacgatcttacctttgtgtttggtcagctggtgctttattatgcagtgtttgccccgcatgacacaaaacaggaaaaacgccgccgtcgtcgcctgcttgcagcttgtacgtttttcttttttgtaggcatgaagcgtatcgccattccggcggtggtgctgtttatttttgtggcgctgatcgtccgccgtttcaaagataaaaagaagctgctcactctgtggggtgttgcgtgggtcgtgtttttctttttgtatatttacgcggtccggaacggaaccgtttcaagaatcctgaacatggcaggcattgatatgatgggccgtgattatctgtggagtcttgctaacgattattatacctattctatcacctattgcgggcatggctttgagtttgtggatactattgttaccggctggtataatgcaggaatcattaacgagccttttcctttccacaacgacatcttaaaggtgtttgtggaaatgggctttcccggttttgtgttctggacgggcatccaatatatcattacgccgatcttctggatgcattacgcggatgaggacaccgcgttgctgtacctgagcaatctcagctacatgacaatgacataccttacggacaacacatccttttctttctggtgcacgatggcgctgcggctgctgccgctggcctattcggtacagcggcgcaagccgccaaagtcgcaggtctggaagccgaagaataagaaggaaatgcaagaccgcatccgcatcatgatgcaggaaatgtaaaaggaaaagcgttataggtttgaacgattggggcggaagtgcttgtgtgcttctgccccaataaaattatacaggtgctgaagtacaatagccagtatgcaggtgaaaaacagcacgccccagaagtagaagatgtcaaaaggacgagcgtttgttatatagtagttctttgtgacatcgagaactgcaaactgaaatagatacaggaacggagcatagggattcattgtgcggagaattcgattgccaactttgaatttgtccagcagccagatcaaaagcagaccgaagaaaaggttcatgagattgtggaaaattaagtctggtaagcttttttcgggtacggttatggcaagaaatgaaaaaacaagctccgcagcgatgatcgaaggcagggcatatttcttttttaaaaaagcggcaaaaaagtctgcatattcatagataattactccaaagggaaaagctagctcgctgatgtaataaactctgtggtttaagcctgtaacagcatcaaagatgcagaggatcgcagtgatgatgaatataacgccgaaaagaaaaacgacacgccggaatttattttttgggaaaatgcggtgggaaacatagaagatcagatacagtacagtcaacgtaggcatataccagttgaccagctgaaaaatctgatgttcgcctagcatcgtgttccgaatgagcgtgctcacaacgcttgaaaacagggtgatccatagcagatcgacgatctttttccagaagttgcgcagatagttcggttttgaggcaacagagcaagcaagcccaaagccggatgaaataaagaaataacctacgcccaatgtggagatcttgcttaacggcaatagaatatgcggcataggaaaaaacggatttgtacaatgggaaaagatgatcagtactgcaaaaacaaagcgcagctcatgcagacggttcatggtctttttgatatcggcgccggttggacagaactgcatatttaaaagacaaagcactgctaaaaaaagatataaaaaaatatagggcatatgcggcctcctgacgtttttgcttctgtgtcttgcgaatctctaaagaaggagaatacaagtttatcttatcataagctgctttgcatggcaagcagacaataaataagcaccacacatttctgtgcggtgctttttgttctggtggagattaccgggctgttgtaatcacggtgacctcttgcagtccatgcacggcgctctcccgggtgaactgggccctcactcgtttagcactaacaaaaaagcaccacacatttctgtgcagtgcttttctttctggtggagattaccgggccgattcaaatcacggtgaccttcttgcagtccatgcacggcgctctcccgggtgaactgggccctcactcgtttagcactaacaaaaaaagcaccacacatttctgtgtagtgcttctctttctggtggagattaccgggatcgaaccggtgacctcttgcatgccatgcaagcgctctcccagctgagctaaacccccagatgtcttgtcttgtgcctgacgacgtgtgtaattataccagccataggggcgcttgtcaacaggtttttgaaaattttttgcagcaaaaaatccccgcagggcgtgtgcccggcggggatcgaaaagcgggaaagtgctcttttttgaaaaactacgccttagcgtgcctgacggtcaaagatctgcggagccacgcggcacagcagcacagcggccaccatggtgagcagggtctcgggcagcatataactgccgttgtaggtcaggctgtaagtccatgcggccagaccatcattcaagttgccccagaccagcacaccggacaaaaagctgcacataaagcgcaggaaaccggcggcaaaggtgcccacggccacgcctacggtgcggttcttgaaggggcgggcgaacagctcggccagacccagtgccataaaggccagcacatagtccagcagcacctcaccgaggaagtagaggaaggtggaagcgggaggagggtagaagcccatgatcatttgcaggcaggcgttgacaaagccggtgaataggccccactttgcgccgtggcggaaggacaccagcacaaagggcagcatgctcagcagggtgatgctgccgccgttgggcatggtgaagaacttgatgttggaaagcaccgtgccaatggcgatcatcagggcgcattccaccagaatacgggtcttggaataggttttggacatgatgaaaagattcctctctcatagtagtacacaaaaacaaaatgcgcctgctggcagcagacgcatggaggtttgttgaacgtaccggacagttccgcaaactccctacgccggcattgcccgaatcaggtaaagggtactccgcgcgatgcggatctcagccttacggcacccctgtttttatgtccgcccacagtatacgcgccgggggacaaaatgtcaagcccgcagacatattccgccccggcggcgcgtatgttataccattgcaaagctggaacgcagggaggcgggatatgaaagccgatccggaacagcgcgccgtgcagctgggcgagtacattgccgcccacaacgccacggtgcgggcagcggcggctgcgttcgggtgcagcaagtccaccgtgcacaaggacgttgccgtgcggctgcgcagcatcagccctgcgctgtacgggcaggtgcgtgccgtgctggcgcgcaacaaggccgagcgtcacctgcggggcggggctgccacccggcgcagatacagccgccgctaaaccccaaaaagaccgctgcattgtgcagcggtcttttttgagccactttttcatggagggcgcagcgaaaagcggctgcttttatcccccggtgtggaactgctgcaatgcgcctttttccagccggcttacctgtgcctgactgatgccgatctcctgcgccacctccatctgggtcttaccgcgcagataccgcagctccataatgcgcttttcccggggcgtaagggcggctaccgtgtcccggaactgcaacccgctgatccagctttcctcgctgtccgggtcgcgcacctgatcgatgacatacatcgcatcgccgccgtcggtgtacaccggctcgtcaaggctgagcggctccaccaccgattccagcgcggcggtcacctcgcgccgggcaaggcccgctgcggcggcgatctcgtccatggtgggctcgcgccccagctgcttttccagcgcttcccgcgcctgcatggcgcgataggcggtgtcccgcagggtacggcttacccgcagagcgttgttgtcccgcaggaatcgccgtatctccccgatgatcatcggcacgccgtaggtggagaaacgcaccggctgcgcggggtcaaaattgtcgatggctttgatcagcccgatgcaccccacctgaaacagatcgtccagattttcgccccgctgggcaaaccgctgcaccacgctgagcaccagccgcaggttgccctccaccatccgcgcccgggcagctttgtccccggcgtgggcaagggtgagcagctgacgcttttccgcttcggtcagcacaggcagctgccccgtgtttacaccgcatagctccaccttgttgtacatccaaacgcccccggtcttttagctttaccggaagtatggctctgtgcgccgggcgctatgcgtggaaaaaaattgagcgcccctccgcaaaagaggggcgctttatagacaaatctgtaattttatggtaggctgtgactggcggcgcaagccgtccatcaggcgctgtgcccacaaacgcaggcggctagctccttaccggtacctgagtgccgggtaagagcgaatttttttctttgaaatctcgattctccccggacgcttaagggcgggaaggggggatgcgtcatgacatttgaacaggtcgtattgctgctcacgctgctcggcggagcaatctacatcacctttcagatcacatggactgtatcacacagtgatgataaaaagaaaaaatgaccgcctcactgactaccaatcatgaacggtcatttttcttttgatctaacatggtaaggagttagccgtttgccgggccagcgcctcttgtgtttttattatacacgttcccacgcggaatgtcaagcgctgtacctgcggctactcgctttcaaggcgggttttcagggtgtggatgatgcgcttttccagccgggagatatagctctggctgatgccaagggcgtcggcggcttccttctgggtgcgctccacgccgtcggtaaggccgaagcgcagctccatgatctgccgctcccgtgccgaaagcgctgccacggcgcggcgcagcacggcgcgctcggcgtcctgctccagctgctggcttaccgcgttggcatcgctgccaaggatgtccgaaagcagcagctcgttgccgtcgccgtccacgttcaaaggttcgtcgatgctggcttcctgccggcggttggagcttttgcgcaggtacatcaggatctcgttgccgatgcagcggctggcgtaggtggcaagcttgatgctgcgggcaggggtgaaggtgtttaccgccttgatcagcccgatggtgccaatgcttaccaagtcctcggcgggcacgccgctgttttcgtacttttttgccagatacaccaccagccgcaggttgtgggtgatcagctcctcgcgggcggcggcgtccccggcggccatgcggtcaagcagggctttttcctgctcgggggtcaggggcgggggcaggctgggcccgcccgccagataatgcaccgcgccgcagtagcgcaaacgcccccacagccgctgccacatctgccggaaaaactgcaacatggatatccctcctgtgcaataattattatatgtatgatagggagaactccctcagtcaaagtcttgcggctttgccagctccctcggggagggagcctctggcgaaaccgcaaacgttacggttttaacggaaacttttccgccatgccaaaggccccatcccagagggggctggcatcgcgtagcgatgactgagggagtttactttgcggcagcgccgaaaggcgtccccttgaggaaagacttcccccggccgggggaagatgtcaccgcaggtgacaaaagggggaatctggcgcgttagcgcctgagggggtaaaactacacccccacatcctccgctacatcgtcccccagcagcagcgtccatgcgccggcgggggcgtccggggcgcaaaaagccgccagcaggccgggcacgcggcgctgcccgcagcacagtgcggcgggtacggcaggcagcaggcagcggccggtaacggcggcgcagggcacaaactgtaccccaagcccggggggcggggcggcgccggcggcaaaccagctgtctaaggtttcccgcagcggcgcgggcagccggctgcgcaccggcgggtactgcaccagcaccacccgccgcccggcaagggggtcctgcagggtaaagccggtgtcgtggtaagcctgcaccggcacagccgcccctgccagatgcagcacggcggcaaagcagccccgctgcgggcgtccaaacaccgccagcagcccgcgcagcagcgcatacaccccggcgcagcagagcaaaagctgccccgggcgcaccggcaaaagcacgctcaggttgttggcctgcaccccgggcagcaccaccgcgccgcacagcacgccgttcagcgccgcgtaccacccgcacaggcgggcaaagctgcgcgccccgggcacgccgtagcacaccgctaccacgcagcagcagctgactattttatatagtaccgccagcggggcgcaccacggcggcgccagcagggcaagggtgcttacggcagccgccgcgctgcccgcgcacagccgcagcccggtgcagctgcgcccgcacaaaagccccgcgcccagcagcagcgcggcggctgcggcaaagtttaccagcagcaattcgtccacaaaaacaactgttttcattgcaaagcaccgccttatggttctgagagccagtttttcataaaattgcgaaaaaaactgtcacaccagaaaaacccgcatgaacagtgcatatttgctacaaaagccgggactgggtttcacagtttttacacttttttcaaaaaagtacttgaacatttctggaaagtgtggtatattattgccatcctagtaaggattgagccggaaacaccggttcgaaaatattttttctatttttgaagggagtaattcattatgatgatgcctgcaaatttctctgctgtgtctgagaacgaaatgacctacgttatcggtggcggcgttgctgactacctggcccccgtgatggagtctgctcagtggcagaacttcagcaagaacatggtgactgtggtcggtaacaagtacctgagcggtttcctgaccaacaccgttggcgctatgttcagcggcacctggaagcccggcgttggcatggctggcttcggcaagcagttcggcgacatctgggctaccaactacaccaacaagctgggcgatgacaccaccggcttccagaagttcaagtggggcctgaagggcgctggcaacatcgctctgaacgttgttggcaacctggctgctatctacaacttgggcttcggcaccgtgaagaacgctgcttccgagagcaccttcgttaagaatggcgatttcgctttctaatcagttttaactgactagatcatgcttgcgtgactgtacccctaggggtgcagggaacatactagcataataacacccccgtaggcttatgcctgcgggggtgtttttttaccccttccgtctcgctgcgctcgccagattccccaagggggcaccttttggcaatgctggaaagtttgccgctatgccaaaggccccatcccagagggggctggcatcgagcgcagcgagatgactgggggagttttagcgtcctcgccctctccgtcacggcttacgccgtgccacctctcccaaagtgagaggccttggcagtccacatttgttttattttatggcaagagtgcttccctttgcaaagaatcgctttcagatgaaacttttgtatctgcaaactttacggtgcaatcggaaacttttccgccatgccaagggctctccctttgggagagctgtcaccgaaggtgactgagagggcgagctcgctgcccggcaaagccgcaggctttgactgaggtggtgttcacacttcttttaccagactgttactttccgttttatgcggtttgtggtatactatggtcaacatgggtcaccatggctacactgaaacagacaggatgtgaaatcctcttatgaaagatggttttttaaaggcagctgctttttcgcccgccttgcgggtggcagactgcacctataacgcgcagcagattctggagcggctgcaagctgccgcgcagcgtggggtaaagctggcggttttcccggagttttgccttaccggctacacctgcggcgatttgtttttgcagcgcactttgcagcagggcgcactggatgcgctggaatggctgcttgcgcagacccgcacgctggataccgtggcgctggtgggcttgccgctgctggtacacggcaagctgtacaactgcgccgccgtgctgtgccgcgggcagctgctgggcatcgtgcccaagacctacctgcccaactacggcgagttttacgaaaaacggcagttcacccccggcagcaccgaggtacagacggtgactgtctgcgggcagcaggtgctttttggcacgtcgctgctgttccgctgccgccagatgcccagctttgtgctgggcgtggagctgtgcgaggacttgtggagcgcgctgccgccttccaccttccacgcgctggcgggcgctaccgtcattgcaaacctttctgccagcgacgagaccgtgggcaaagccgagtaccgccgtgcgctggtggcaaaccagtccgcccggctgctgtgcggctacctgtacgcctcggcagggcatggcgaaagcaccaccgacatggtgtttgccggccacgacctcatcgccgaggacggcagcattcttgccgagactgcgccctttgcgggcgaccatgccgagaccgagctggactgccagcgcatggaagccgagcgtgcccgcaacaccagctttgagcccagcgccgagggctacgtcacggtggaatttgaccttgcaccggaggaaacggtgctcacccgccgcatcgaccctgcgccctttgtgccgggcgatccgcagcgccgcgccgcccggtgcgagctgattttaaagatgcaggccgatggccttgccaagcggctggagcacgcccgcgcaaaaacggcggtcattggcatttccggcggcttggacagctgccttgcgctgctggtggcagtgcgcgctatgaagcagctgcaccgccccgccgccgatgtgctggcggtgaccatgccctgctttggcaccaccaagcgcacccgcagcaacgccgaaattttgtgcggggagctgggcgtgagctttcaggagatccgcattgccaacaccgtgcgcagccactttgtggatatcgggcaggacgaaaaggtgctggacgtcacctttgaaaacgggcaggcgcgtgtgcgtacgctggagctgatggatcttgccaaccgcaccggcggccttgtggtgggcacgggcgacctttcggagctggcgctgggctgggcgacctacaacggcgaccacatgagtatgtatggcgtaaatgccggtgtgcccaaaacgctggtgcgctatctggtgcagtacgaagccgagactgccgccaccgccgctttgcacgatgtgctgctggatattctggctaccccggtctcgccggagctgctgcccgccaaggacggcgaaattgcacagatcaccgaggatctggtgggcccctacgagctgcacgatttttacttgtattatgtgctgcgctgcggctttggcccggcaaagatctaccggctggcaaaggctgcctttgcgggcagggcagagtacacggacgccgtgctgtacaagtggctgcgcaacttctactggcgcttttttgcccagcagttcaaacgcagctgcctgccggatggccccaaggtgggcagcgtgaccctttcgccccggggcgactggcggatgcccagcgatgcctgcgccaccctttggctggcagagctggagcagctcaagcccggggagcagtaagctatgaagaacaaaaagcttttgaccaatatcctgtttgcagcggtggtgctggccatcgcagcggtactgctggctgtgcgcagccacagcgccaccggcggaaaactgactgcccagctgatctacggcgacaacaatgccgtgctggacattccgctggacaaggacgagacttacagtgtggacaccggttattatacggtgcatatagaggtaaaggacggcagcgcgcggtttattgaatcgccctgcccggatcacatctgcgagggctttggctggctgtcggcggaggatcagaccgccacctgcctgcccgcccgcgccgtgctgaccatcgttccggagggctaaaaaaggagtattctcatgttggacgaaaacgagcattcccgcaaggaggacggccgctccctgcaccgccttttgcacaagactgagcagcaggacgccaccgtggaggtggacagcgccgcgtttttctcggagctgccgccggagcaatctgctccgccgccccgccgcccgcagcaaaacaccccccgcaccactgcgtccgggggaaatggggcataccagcccccgaaacgagggaagatcttgctgatcgtacaggcaattttaagcgttctggcgctggtgcagctatggcgcacccagatgctgccggtgctgtatctggtggtgctggcggcgctgcttgcactgctgtggctgctggtcaagcgctgtcaggagtacaaaactgcaggcgcggtgtcccgggcattctcggtggtgctgtgtgctgccatggcgctgggctgcgtgtgggcgcagcagggtctgacggcgctgggcgatatgaccaccggctttttgagcgatgccgaggcgaaaaagatcaccaaagagccttttgtggtgtacctgagcggcgtggatacccgcggcgagctgaccgaaaaagcccgcagcgatgtgaatatcattgccgccgtgaaccccgagaccaagcaggtggtgctgatcaacaccccgcgcgattactatgtggatcttgccggaacaaacagcaaggataagctgacccatgccggcctttacggcgtgcagaccagcatggacacccttggcaacctttacggggtggatgtgcagcactacatccgcatcaattttgcaggctttatcaacatcgttgatgcgctgggcggcgtggacgtgtactccgatcaggcgttcacctcggtgggcagccccggctactacgaccccaccacctttgccgagggctggaaccatctggacggcaaagctgcgctggcctttgcccgcgagcgccacgcctttaagaccggcgatgtgcagcgcggcatcaaccagatgaaggtgatcgatgccatgctgaacaagatcaagtctccggcgctgctgatgggattttccaagatcatggattctgccgccgattgcttcgtcaccagcctttcccagaaccagatcagcgcactggtgcggatgcagctgagcgattttgcagagtggaacattgaaagctacaccgttaccggctcctccggcagcagcaccaagtgctactctgccaaggggcagaagctctatgtcatgaaaccggacgaaaactccgtggcaaaggccaaggagatgatcgcggcggtgctgggcggcgagggcacggtaagctccaccacccagaccccggaaaagacggacgtgtacacccccaccgctgaccccgatgccgctgtctctgtgcctgagacgcccgccgacagcgtgatcgtggaagaaccggtggaaagcgtgcccgaacagtctggtgagcagcctgcggagcagcccgccgaacagccggcagagcagcctgcggaaacgcccgccgagcagcccgctgccaccgagacgccccagccggagccccccgccgagggcggcagcaccgagacgcccgccgtcagcctgcccacgcaggagcaggtagagcagaccgcaggctcgctgtacagcgccgcttccaccgtgctggacgccatccttggcggcagcgggaactgagcatcccttttgcgtaaacaacaaagaggtcactgcacaaatcctgtgcggtggcctctttttacgttgctgcaacaaaaaagctgcctgcatagcagcagacagcgcaaaaacacaaaagggaaaacgagatagaccgtaagccgggttctgtattaaacgacgatctgtctaggcctgccattgctgacaggctcgtgccgccttcgggacacgcgagcagcgctgtacgtcccatataggcgttgcttccggtagggtttacaaagccgcatggtcacccatgcgctggtgagctcttacctcgccgtttcatccttaccgcattgctgcggcggtttgttttctgttgcactttccctaaggtcaccctcggctgccgttagcagttaccgtgctctgtgaggcccggactttcctcagagcggtcaaagccgccccgccgccgtatgttccactcgttttctgttcctcatgataccataaaaaagtaagatttgcaagtgaaacgaatttttgttataatatcatttgtattttttgtggattttgcaggggaggggcaggccatgcagctgtattttgccgtgccagatacggctaccacccacgagggggtgctggtgcgcagctttctgcgccagtgtgccgtctctaccgaccttgcccgggcggtcaagttccggggcggcggcttttttgcggacggtgtgcctgtgctggcaaaccggcgcatcttccccgggcaggtgctctcctttgccctgccgccggaaggggacggtgtgaccccgcagccggagatcccggtcaaggtggtctacgaggatgcctttgctgtggtgctggaaaagccgccgcagctggcagtgcaccccaccctgaactaccccggcggtacgctggcaaacggctacgcggcgtgggcggctgcccacggccacagcccggtgttccgcccggtgaaccgcattgataaggacaccagcggccttgtgttggcggcgaaaaacgcctacgcagcgccgctgctggcaggcggggtggaaaagctgtactatgccattgcgcagggtgcgctgccgctgggggaaggggtcatcgatgcacccatcggccgccggggcgacagcatcatcgggcgctgcgtcacccccgagggcaagcccagccgcacggagtatactattataaaggaagaaaacggccttagccttgcggcctgtgtgccggtgaccggccgcacccaccagatccgggtgcattttgcgtccatcggccatccgcttgccggggacgacctttacggcggcagccgggagcgcattggccggcaggcgctgcactgcgccagacaaagctttacggtgcctgtatacaccccgctgccggacggcatccgggtggaaatgcccttgcagctgcgcacggtcacggtggaaagcccgctgccgccggatatggaagcgcttttttcgtgaaaactgcgtgaaaaagtagccaaattttatgtaagcgcttgtttcaaaccgtgcaaagtgtataataaaaaagagagcgtattgtgtacaggccctgttggccttttgaacaggggaacgtacaccatctagctgctgcgttccgggccgaaaaaatgccctgcagcggcgcaggaaggagaaaatcccgttgactgaagataaaacaaaggagcagcagcccgctgcgcagccggtacggcagacccgccgccaaaagctgcgctcgctgtgggcacagctccagtgccggggtgtgctgcggcggcacagactgcgccgcaagcgtcagcaccgccgggaaacgctgtggcataagctgctgcacaaccccgtagcgcccatggtgggcgagacgctgtacgccatcggcttttccgccgagtatgcggtcatccgtaccgggcgccgtttgcagcacgggctgcagcgtctgctgcagatgggcagagatctgctgaaaaatattgcatccatggcctttcccggggcggcgcggctgctgcgggatctgtttggcccggtggtgcttgccctgcggggcaccggggcgctgctgcgccacgcacaccgggtgcgcaagcaaaaaggctttggcgctgcgttgcgcgcaagcgggcacttcattgcggagggcatcgccgataacatccgccttgtgccccgcatggccatgtatgtgctgccggcggcagcactggctgttatggtgacggtgttccagaccaccatccgtcagccttacgctttgcaggtgcaggtggacgataaaactgtgggctatgtggccaacgaagaggtgttcaactctgcgctggaggctgtgcagcagcgtatcaactattccggtacagagcaggcgcgctttaccgtggagcctacttattccgtgaccgtcgcccatgacgtgatggacgaaaatgacgtggctgacgctatcctcaaaacctccagcgaccagatcagcgagggcacagccctgtatctggacggtgagctgaccgccgtatgcgcggacggcaccggtctgcaacgatacatcagcagcctgctggaaccctacgagaacccggacgaccccaacaccaccgtgggcttcaacaaggatgtcacgctggaaaacggcatctacttcaacgagagcttccaggaggaagctgaggtggagcagttgctctccggcgtgcagcaggcagaaaaatcctatacggtgcagaacggcgataccatctggtccattgcccagaaaaacggcctgaccgtgaaggaactgtgcgaaatgaacaccggctttaccgccaacggcgaaaacggcctgacccagaactccaagatcctgcccggcgatgcactgaccgtggtgcgggaggaggaaacgctggaggtgcgcatcaccaaggtggaaagctgggaggaagagatcgcctacaccaccgagaccaccaaatccaacgagctgaactccggtaccaagcgtgttacccagaagggtgagaacggcatccgcaccgtgacggcacagcgggtgtacgatgcaaacggcaatcagctttcccagcagatcctgagcaccgtggtgaccaaggagcctgtgactgaaaaagttacggtgggcaccaaaaaggtgtcctccggtgcatcctatatcaccggcagcggacggttcatctggccggtgcccggctatcggaactgctcccgctggtacggcggcagccacaagggcgtagatatctgcgccgccgccggtacgcctatctatgcttcggcaggcggtacggtgaccaaggccggctataaccgcgccggtgcaggcaacggctacggcaactccatcatcatcagccacggcaacggctacaccaccttgtacgcccactgcctgtcgctggtggtgcacgccggccagtcggtcaagcagggtcagctcatcggctatgtgggcagtaccggacgctccagcggcaaccactgccacttcgagatccggcgcaacggctcttacatcgcaccgcagaatgtgttcaaccgcagcaaatatcggtaaatagcagcaagggcttttccacaggggaaagcccctctgctgtatcatgaataaaaaggagagatcatctatgtctacccctcacatcagcgcagaaatgggcgatttcgccaagacagtccttatgccgggtgaccccctgcgtgccaaatttattgccgacacctttttgcaggatgtccggcaggtgaccggcgtgcgcgggatgctgggctttaccggcacctacgaaggccgtcccatcagtgtgatgggcagcggtatgggaatgccctccatcggcatctactcctacgagctgttcagcttctacggcgtggaaaacatcatccgcatcggttctgccggcagctacaccgagaaggccaagctgttcgacaccgtgctggccaccggcgctgtgagcgagagcaactacgcccgagtacagagcggatttaccggcaacatcaccctgcccagtgcagctttgaacgaaaagctgcgtgcctccgctgcaaagcagggcatccccctgatcgagggcaacatccactcctcggatgtattctaccgccagccctcggacgcaaagcccacctactgggaaaagctgcgggacgaggatggctgcctgtgcgtggagatggaaagctttgccctgtttgccaacgcgcaggtgctgggcaagaacgccgcctgcctgttgaccatctcggacagctttgtggcccccggcatcaccaccgccgaggagcgccagaagagctttaccgatatgatgaaggtcgctctgggcgcagagtactgatcgcataattttccagcgcggctgccgccctaaggcacagccgcgctgtttttgcccataaaaggaggaaacagcatgacaaaattgaccatggaagaaaagcagcagctgatccgcatggcactggccgcgcgggaaaaggcctatgtaccttacagtgattttatggtgggcgctgcactgcgcgctgcggacggccgcatctttaccggctgcaacgtggagaacgccgcctttacccccaccagctgcgccgagcgcaccgccctgttcaaggcggtggcggagggcgtgaccgcgtttacggatatcgccgtggtgggcagccgccggggcgaagtgaaccggcagatcacctcgccctgcggggtgtgccgtcaggcactgtttgagttcggcgggccggagctgaacgtcattatggcaaagaccccggaggatttcattgagcgcagcatggacgagctgctgcccttcggctttggcccctccaacgtggcgggcaacagcgccgtggaaggggagtaagtgttcttctttgaaaaacagcgcaagcagggataaattggtgaataagcattgcttttttataaattatacaagggatttgtaaagaatttgtaatcggaaattgcttgcatctgtcacatccacccgctatacttgagccagtaaatgtgccagagtgcacatttcattcttttgacgcaattttttaaaataaaaggagagtttcttatgaagatttctcgtcgtaactttctggctgtggccggtgctgctgccgctgccgctgctctgaccgcctgcggcggttcttccgcttcctccaccagcactgcttcttccgcagctgccagctcttccgccgcttccggcgcagcagacggcgctgagaagatcgccaaggtcgctctgacctgcgataccggcacgatcgatgatgagagcttcaaccaggcttgctgggctgctgtttccagctacatgggcgacaactgccagtactacatccccgattccgatgcttccgatgaggaccgcgagaccatgatccgtcaggctgtcaacgatggcgctgatgttatcgtctgcgtgggctacctgtacggtgcctctctggcatgggctgctgagcagtaccccgacgtcaagttcatcgctatcgatgtgacccagggcgatatcggcaccgacagcatccccgcaaactgctactgcatcaccttcaaggaggagcaggcaggttatctggcaggctacgccgttgttaaggacggctacaccaagctgggcttcctgggcggcatggctgtgcccgccgttatccgttacggctacggctatgtgcagggcgctgacgctgcagcaaaggagctgggcaccaacattgacatcaactacttctacggcggccagttctacggcgatgccaacatcacctcccgtatggagggctggtatgccaacggcactcagatcgtctttgcctgcggcggcggcatctacacctccgctgtcgaggctgccctgaagaacaacggctacgttgtgggcgttgacgttgaccagaactacatcggtgtcaacggcgtggcaaaggacggctacgcttacaacccgttcatcacctctgccatgaagggcctgtctgagtctgtcagcaccgctttgggcgatatcgaggctggcgagtggagcaacatcgctgctaccaacggcaacttcggtctggaggacggcgactacgttggtctgcctactgctgatgacagctggaacttcaagaccttcaccaaggacgagtacgagaccctgaagaccaagatcgcttccggcgagctcgttgtggacaacagctccgacgacgctaccaagcccaccgtcagcgagttcaccaaggtcaactacatccagtaatcgctatcccggaattactcccgtaataggggcggggtgctcatgcaggggcaccccgccctttttgtatgcctgcgtgggagaatcagattggaaatcgtgcagaccgtacaaaagtaatacttttacttgtgctttttgacaaaaaatcaaaaagccgtgtgcaaaccgcaaaaaatcaggtataatggtttgtagtatagaaaaggtgtcgttacggcacgaaaggagagtgagcagattggcagaggattatgtgatcgagatgctccacattaccaaggaattccccggtatcaaggcaaacgatgatatcaccctgcaactgcgcaagggcgaggtacacgcccttctgggcgagaatggtgcgggcaaaagtacgctgatgagcgtgctgttcggcctgtatcagccggaacagggcaagatcctgaaaaacggcaaggaggtcgccatccgcaaccccaacgatgccaacgcactgggcatcggcatggtgcaccagcacttcaagctggtggaatgcttcagcgtgttggacaacatcattctgggcgtggagcccaacaagatgggctttttgcagaaggccgaggcacgcaaaaaggtgatggcgctgagcgaaaagtatggtctgcgggtagacccggacgcactcgtcagcgatatctcggtgggtatgcagcagcgcgtggagattttgaagatgctgtaccgcgacaacgagatcctgatctttgacgaacccaccgctgtgctgaccccgcaggagatcgacgagctgatggagatcatgcgcgggttcaagaaggagggcaagtccatcctgttcatcacccataagctgaacgagatcatggctgtggccgaccgctgcaccgtgctgcgcaagggcaagtatatgggtacggtggatatcaagggcaccaccaaggaagagctttcccgccgcatggtgggccgtgacgtgcagctgcaggtggaaaagcagcctgcgcatcccggcgagactgtgctggacgtagaaaacgttaccatccacaacgaccagcgcaagaaggacgtggtgaaggacgtgtccttcaaggtgcacgcaggcgagatcgtctgtctggcgggcatcgagggcaacggccagaccgagttcatctacggcctgaccggtctgagcaagctgtctggcggcaagcttacgctggacggcaaggatatcacccacgagagcatccgccagcgctccaaggacggcatgggtcacatcccggaagaccgccacaagcacggtctggtgctggatttcagtctggaaaacaacatcgtgctgcagcgctactggcagccggagttccagaagggcggctttatccgtgccgataaggtgcgcgagtactctgaccggctgatcaagcagtacgacgtgcgcagcggtcagggcagtgtgaccaccgtgcgcagtatgtccggcggcaaccagcagaaggccatcatcgcacgcgagatcgaccgcgaccccaagctgctggtggcagtgcagcccacccgtggtctggacgtgggtgctattgagtacattcaccgccagatcgtggccgagcgcgacaagggcaaggccgtgctgctggtcagcttggagctggacgaggtgatgaacctttctgaccgcatccttgtaatgtacgaaggcgagatcgtgggcgagtttgaccccaagaccaccaccgtgcaggagctgggtctgtatatggcaggcgcccgcaagcagggaaaggaggagcagtaacacatgaataagaaaaaactttcccgcagcggcagcctgcaaagttctgttaccagcgtgctggctgcactgctgtgcatcctgattggtttgctggtgggctttctggtgctggtagccatcaaccctgcacacgcatggggcgatggctttgtgcgcatcatcaagggcggcttccacgatgccccctacggcgtgggcaaagagcttgccaatgccgcacccctgatcatgaccggcttgtccgtggcctttgccttcaagaccggcctgttcaacatcggtgcagccggtcagtacacgctgggcgcttacggtgcgctgtactgcgccattatgctcaagctgccctggttcgtctgcctgctggcagcagccgtgctgggcggcctgtggggcgcgatccccggtttcttcaaggcctacttcaacatcaacgaggtcattacctccatcatgttcaactggatcggtctgtatctggtaaatgagctcatctaccagaacggcaccggccccatgtacgacgtgcgcaacacccgtactttgaacctgagcaagaacgccgattttgcccagtccctgatcccggacttcggcctgaacaagctgttccagaccaacagcaccaccattgccatcttcctggcggcagcggtggctgtgctgatctgggtggtgctgaacaagaccaccttcggctacgagctcaaggccgttggcctgaacaagaacgccgcccgctatgccggtatcaacgagaagaagaacatcatcctctccatggccattgccggtgcgctggcaggcttcggcgcaggtctgttctatctgtccaacgtgtcccagtggaacccgctgaactccaccagcctgccgggcatgggcttcaacggtatctcggtggcactgctggcaagctccaaccccatcggtaccgtgttctctgcgctgttcatctcccatatctcggtcggcggctccttcctgtccaccaaattctaccccactgagatctcggatctgatcagcggcatcatcatctacctgtgcgcattctccatgctgttccgcggcaagatccagagcctgctgttccggaatgccgaaaagaccaatgtgaacgcagagcctgcgcctgccgcagaaaagaccaaaaaggagggcaagtaatatgctgcttctgatcaaatataccctgctgtacggcatcgtgctgatgctggtggcactgggcggtatgttcagcgaacactccggcatcatcaacattgcgctggagggcatcatggtcatcggcggtgtggccggtgtgcttaccctgaccatgctgcctgcaagcctttcgcccttccttgtggtgctgatctccattctggtggcagcgctggcgggcgtgatctacagcctgctgctggcttttgcctccatcaacctgaaggcagaccagaccatcggcggcacggcactgaacctgctggctaccgccattgccgtggtcatctccaagtacttcagcgagagcggcagcgccaagctgaactactccaacaagcccttcctgttcagcatcggcgggctggagctcagcgtgttcgtgccgctggggctgatcttgctggtggtcagctatatcgtgctgtacaagacccgcttcggcctgcgtctgcgtgcctgcggcgagcatccgcaggctgcggactcggtgggcatcaacgtctacaagatgcgctacgccggtgtcatcctttccggtgcgctgggcgcgatcggcggtctggcttatatcgtgcccccggtgcagacctggaactttgaagtcggcgtggccggtgcaggctttctggcactggcagttatgatctttggccagtggaagcccttccacatctttggcgcagccatgttctttgctgtgttcaagagccttgccaacattgcagactccaccttccttgcgcagctgcactggtccagcaacatctataatatgatgcccttcgtggcatccatggtcattctggccttcacttccaagaacagcatggcacccaaggccgagggtattccctacgacaagggctcccgttaaacgttttcgctaaaaatccataaaaagggcatccgcagccatcaaagtgctgcggatgcccttttttgtacgggaaatggcaaattttgttcatttgtttgccggcagaaaatggcattttctgcttgtaaaatacgccgggatatgttatcattaaaagacgaatgtgtatctataggaacccggtgtacatttcttgcactgcggaacaacaagaaaggtgagtttctctactatggacgaaaaaacaactatgggacagccgctccgaagcatggaggacgaggagaccattgatctgatggagctggcgcgcctgctgtgggcgcatattgtgcagatcgtggcagcagctgttgcggcagcgctgatctgcctgctggtgtgtatgtttgcgcttacacccaagtatcaggcttctatcaatatgatcgtgaacacccggcaggataattcctctacctttaccagtgataacttcaactctgccaagaacctgatcagcacctatgcggtcatcatcaagggcaacaccgtgctgaacgaggtgatcgacacgctggatctggatatgacctacggcaagctgtataagatggtggaagtgaccagcgtggactccacccagatcatgcagatcactgtcactgataccgatgcagagcgtgcaggcgagattgcccagaccattgcggacatcgtgcccgatgtgctggtggaaaaggtggaagccggctcctgcaagacggtgagcgatgtgtctatcaaccccaacaaggtgttcccccagactaagaagtacgttgtgatggccggtctgctgggcgctgttctggtgtgcggcgttctggtgctggcacatctgctgcacgataccgttgtggacgatgaagatgttcagaagaagctcggcctgcccgtgctgggcctgatcccggaggtgtaagacgatgtggaatctgtttaacaaaaagaacaaaactgacggcgagcaccgtaccctgcagctgatcaccgataaggggatgccctttggctatgtggaggcctacaagtctctgcgcaccaatctggattttatggcaggctccatggacgtgcacacactggtcatcaccagtaccgtgccggaggaatccaagagcaatgtggcggtcaatctggcgatgacgatggccgaaagcggcaaaaaggtagctctggtggactgcgacctgcgcaagccggtgctgcaccgctacctgaaggcaggccacaacgtaaagggcgtttccaatgtgttgtccaaccagtgcacgctggacgaggcactgcacgagttgaaggaaatgaacttgaccttcctgcccgcaggcaccccgccgccgaacccctccgagatgctgagccagccgcagatgcaggccatggtggatgccctgcgcgaaaagttcgattttgtcatctttgatgcacccccggtgtctgtggtcaccgatgcagccgtgatcggccgctatgtggacggcgcggttttcgttgtgcgctctgactacgcccccgctgatgcagtgcgcggcgcggtgaagaagctgcaggatgccggtgtccgggtgctgggcagcgtgctgacccgctacgacatgaagaaggcgctcaagggctctagctacgcatacagctatgcctataattacaattatgcctacgaaaaacagaaggctgatgttgttgaataaggaagcgctgctatgactgatctgcattgtcacattttgcccggcattgatgacggcgcaaaggatacagcggtctcgctggagctgctgcgcagggaatatgaggacggtgtgcgcaatatcgccttcaccagccacttcaacagcgaacgtaccacggtggaagcctttacagcaaagcgacaggctgcctttgagcagctgaccgccgcactggagggacagcccatgcagtttgacttcaagctgggcgcagaggtgttcttctctcccggtctgtgcgagctggatacccgggcgctgtgtatgggggataccgcctatctgctgctggagtttcccaccacccacaagccgcactttatccggcagacgctgtaccagctgcagcagcagggcatcgtgccgctgatcgcgcatatcgagcgctatccctatgtgctggaggaccccactctgctgtacgactgggtggccgccggtgcttatgcacagatcaatgcaggggcactgctggagcccaagctgtgcaaaaaactgtgcaagttcattcagtggggattggtccatgtcatctccaccgacacccattccccggacaagcgcccgccccgtatggcgcagggtgtgcagcagctggaaaagctgcttggcaaggagacggctgcccgcatcgtgcgcaacggcgatgaactgttccatgatcaggagctggacgctgcgaccctgcatcagcccaaaaagtttttgggaatgtgggtctgatccaattagtaaggagaaaactgcccgggcggaggaatactctgcccgggcagcggattttgatatgaagaaaaataaggtcctgaaaatcgtgttgatcgtgctgggcacgctggtggcattgttggcagcagctgtccttggtgtgctgctctatcttcgcagcatggcagccagtctgccggaaaccctgccggatgccccggcagacagcacacagttcaccctgacggatgatgatctggataagctgctcagcggcgagatcacgctggaggagctgaccggcgaagctgctgcatccagcggcggggaacaggaggcggcggccagtgctccgcaggaggaagcaggttctgccgcttcctcggggagctctggctcccagacggagagcagcaatgcgtcctcttccggcaagaaggagaacactaccggcacatccggctccagcactgcttctgccgcagaaaaaccggcgtcctcttccggtaaacaggaagctgcctacgagacggaggtcaaggcgctgctgaagcagctgtacagtgtcaaggcgcgcgctgagtcggagctgaacagctgcattgccggggcaaaggcagaatacaaggcgctgccggagtctcagcagacacaggcgcgcaaaatctccattgcactggcgagaagcggcagactgtatgcgatgcaggcatcttacgataaggaagtggagagcatcgtcagccagatgcgcactgtgctgaccgccaacggccagagcaccgccttggctgatcaggcaatggcttcctataaggcacaaaagagcgccatgtactcccagctgaccgcaaaattgtactcctgacccgcaaaacgacccatgaccacccgcagtacctttttccgggcattgaccgtgccggagaggggagctgcgggtggttttgcttgtgatatagagaaaaatagcacccttatggatggatggctcaggggcggagacactgccttttgtactgataggggagaacagattgtacgtgccaacggaacagttgcccgaaagaactaaaaagtagcacttttacctacaaataaacagaaaatttgtataaagtataagatttcactcatgctctgctgtaatgaagtgaatttttttcatgtaaattgacaaaattcgaggttgtctttataatagatagagtgtttctcgggtatggacgatggtgtttatgcaaccgcaagatgccatcgttttattattcgcttttctgtccgcgtgccaaggacagacgtccgctatgtgtgaggctggcggactgcgggaaagtgtggctcggcctgagagcaaaaacagtaattcattgataggattggagtggcatcaaacgatggcaaagtacatcatcaagcgtgtcgcaatgggtatcttcagtatcttcattgtggctacggttaccttttttgtcatgaacctggtccccggtggcccgttcgtggcagaaaagtccatcagcgccgctgctcagcaggctctggccgaaaagtatggcctggataagccgcggggtgtgcagtacgtcaactacatgaagagccttttgcacggcgatctgggtctgagcctgcgtcagcgcggccgtaccgtgaaccagatcatcgccagcaaactgccggtgtcctgccgtctggcaggcattgcagtggtggtggctctgtgcgtgggcatcccgctgggctgcatttccgcttataaccgcggcaagtggctggataacattattatcgtgtttgctacctgcggcatcgcgatccccagctttatctccagcgtgctgcttttgtaccagtttggtatgaacatgaaggtgctgcccaccgttggcctgaacagcgcagccgcctatatcatgccggtcaccgcactggccatctatccctcggcttatatcacccgtctgatgcgctccagcctgctggacgtcatgggtcaggactatatgcgcactgcccgcgcaaagggcgtgtcccagttcatgatcctgttcaagcacgcactgcgcaacgccatcctgcctgtcatcacctacgtcggccccatgctggccagcctgatgaccggttcttttgtggtggaaaagatcttctccgtgcccggtctgggccgcgacttcgtgtctgctatcaccaaccgtgactacaccatgatcatgggcaccaccatcctgctgtccagcatggtcatcattgcaaacgtgatcgtggatatcctttataagatcatcgacccgcgtatcaaactgcagtaagagaaaggagcgattttcatggaaaacattaaaaagaatccgctcagcctgcagctcaacgcggaggattttctgcccgccagcaatgaggaaaagcagagcctggtggtcatgcgcgaaagcgtcaacttctggaaggacggtatccgccgcctgaagaagaacaagatcgccatggtcagctttgtgttcatcattgccattgccatctttgcctatctgctgcccgccgtctggccttacagctattccgagcagatgaagggcagcaacaacctgaagcccttcgaatactctgcctccgagcaggcgcgtatcgacgcaggcgaaaaggtgttcccgcacattctgggcaccgaccgtatgggtcgtgacttcgctgtgcgtatcatgatgggcacccgcgtcagcctgtccgttggtctgatcgcttctgtgctggtgctgatcatcggtgctacctacggtgcggttgcggcttttgccggcggctgggtagataatatcatgatgcgtattacagatattctgtacaccatccccgatattctgctgatcatcctgctgggcatggccctgaaggatccgctggatgcactggctaccaagcctggcttcaagtggatgcagacccttggccccaacatgatctccatcttcatcatctttgctctgctgtactgggtcggcatggcgcgtatcgtccgcagccagatcctgatcctgaaggagagcgagtacgttaccgctgcccgcgcactgggcgcttccagcggccgtatcatcaaaaagcatctgctcaccaactgcatcggtaccctgatcgttaccaccaccctgcagatcccggcctccatctttactgagagctacctgagcttcatcggtttgggtgttgcagccccgctgccttctctgggttctctggctaccgatgccgtcaagggcatgaacacttacccccatctgctgatcgcccccgcactgatgatcagcgtgatgatccttgtgttcaacctgttcggcgatggcctgcgcgatgcctttgacccgaagctgaagaattgatgaggtgaacagaaatgagcgagaaaattcttgatatcaaagatgaacgcctttctttcttcacccctgcgggcgaagtaaaggcactgaacggcgtttcctttaccatgaatcagggcgatgttctgggcgttgtgggcgagtccggctccggtaagtcggtcaccgcctactctgttatgggtctgaccgcttaccccggcaagctggtgggcggcaaggtgtggttcaacggccacgagatcgagaacatgaaggagaaggacttccgcaagatccgcggtaacgaggtctccatcatcttccaggatcccatgactagcctgaacccggtgtacaccatcggcaaccagatcgtggaggtcatccgcctgcacaccgataagaacaaggccgatgcatgggcacgtgccaaggagctgctggagctggttggcatcaatgagcccgagaagcgtctgaagcagtacccccacgagctgtccggcggtatgcgccagcgcgtgatgatcgccattgcactggcctgtgagcctaagctgctgatcgccgatgagcccaccaccgcactggatgtgaccattcaggcacagatccttgagctgatgcaggatctgcgcaagaagctgggcatgagcatcatcatgatcacccacgatctgggcgttgtggcatccatgtgcgagaagatcgccgtcatgtacgccggccacatcgtggagtacggcaccaccgacgagatcttctatcagccgggtcacgagtacaccaagggtctgatcaactccatccccaagctgaacaccgcagagcacgagcgccttgtgcccatcgagggcacccctgtggacctgctgaatccgccggccggctgcccctttgcgccccgttgcaagaactgcatgaagatctgtctgagcaagatgcccccgcgcaccgagctcagcgatacccactatagctactgctggctgcagcagaaggctgcatttgagaaaggggaaaaggcagaatgagtgaacacaagacgctggtcgaagtccagcacctgcagcagtatttccccgccggcggtgtgggcaagaaccgcaagtacgttcaggctgtggatgacgtaagctttgccatccgcaagggcgagacccttggtctggtaggcgagtccggttgtggcaagaccaccaccggccgcaccctgctgcgcctgtacgagcccaccggcggtaagatctactatgacggcaacctgctgttcgataaggacaacaagatcgcagtggatatgctgccctaccgccgccgtatgcagatcgtttttcaggatccctacgcaagtctggatccccgcatgaccattggcgacatcgtgggcgagggcattgatatccatcatctggctgagaacgaaaaggaccgccacgataagatcatcgccctgctggagcgcgttggcctgaacagcgagcacgcaaaccgctactgccacgagttctctggcggtcagcgtcagcgcgtgggcattgcccgtgcactggctgtgaaccccgagttcatcgtttgtgacgagcctgtttccgcactggacgtttccattcaggcacaggtcgtcaatatgttcgaggatctgcagcaggagatgggtctgacctacctgttcatcgcccatgacctgagcgttgtcaagcacatttccaaccgcatcggcgtgatgtatctgggcaagatggtggagctggccgacagctacgagctgatcactcacagcatccacccctacacccgcagcctgatctctgcaattccggtggcagaccccattacggcccgccagtccaagcgtatcgtgctgcagggcgatgtgcccagccccctgaacccgccgtccggctgccgtttccgcacccgctgcccctatgcagacgagcagtgcgccaacgaggtgcccgagttcaaggaagtctccaccggccactgggcagcctgccatcaccttgaccgcgtgaagtgagaacacttcacgccagtgaaaggtgaaagcaattcaacttagcgctgaaatgttgtcacaaaatggttacattccaagttttggacttgtaaccggcatgagaacgcattataatcattcgtgttcctccggtgtacaaattatttgcaccggatcgaatatagaggcggctgggggaacctggcacactcaaatttgatataagggaaggatattattatgaaacgcatttctcgtcgtaatttcctcaaggttgcaggcgtgggtgccgctgctctgggtctggcagcctgtggcggcagcaagtccggttctaccgcaacctccggttctgcttcttccgctgctggttcttctaccggcagtgtcaacaccgctggcttcaccgtccagtacggccccaaccccgagactctggatccctctttgaacagcgctgttgatggcgccaacaccatcatcaccatcttcgagcccctgctgatcatcaacgagaacaacgaagttattggtggccaggctgagagctgggaagaaagcgaggacggcctgacctggaccttcaccatgcgtgacggtctgaagtggagcgatggcaccgacctgactgctaaggacttcgagtacagcttcaagcgtatggctgatcctgctaccgctgctccctatgcagcgacctgcctgggcatgatcgacggctacgacgcagctgccggcttccccgatgcagacggcaaccccactgcagagcccaaccccgatgctctgaacgttaaggcaagcgatgacggcaagaccctgaccatcgtgctgtcctacccctgctcctacttcgacaagatggccgcattcgcatccatgagccctgtgcagcaggctaccgttgaggccaacggcgatgcatggtgcacctccgctgagaccttcgtctccaatggcccctacatgatcaccgagtggactccctccgagcgtatcgtcctgaccaagaaccccaactacgttggcggctgggataactccaagatcgtttccgacagcatcaccctgctgctgctggaggactcttctgcttcctacgctgcttataacagcggcgaggctgtcctgatcaaggacgtgcccaccgacgagatccccagcctgaccaaggcagaggacggcggcgacttctatgttgacaccattctgggcacctattacgtcagcatgaacctgcagcgcgatgccttccaggatgccaaggtccgcaaggctctggctctggctatcgaccgcgactacgttgccaacaccatcatgcagggcacctactctgctgcttccaacattgtcggccctggcatcgtggacgagcagggctacttctacgacaacgcgaacggcggttctccctacattgctgatgactacgaggcaaatatggccgaggctaaaaagctgctggaggaggctggctaccccaatggcgagggcttccccaccatcgagtacagcaccaacgattccggctaccatgtgcctctggcagagtacctgcagcagacttggggcgatctgggcatcactttgagcatcagcaagatggagtggtctgccttcaccgctgctcgccgtgccggcgagtacgatgttgcccgtaacggctgggtcatggactacaacgatccttccaacatgatcgagatgttctgcaccgacaacggcaacaatgatggtaagtactccaaccctgacttcgatgctgctatggaggcttccaaggttgctgatcctgccgagcactttgcgcagctgcataaggctgaggacatcctgatggaggatatgggctgcatccccgttgcttactacaacgacttctggctgcagagctcttctctgaagggcgtctggcacagcccctacggctactggtacttccagtacggctacatcgaggagtgatttcctccctgtgctgtgcagcgtaagctgaaccgtatactataagcactaagcaccccgctgaccggaaacggttggcggggtgcttttttactgttatcctgcaaaaaagacgagtgctcggttttgccgatgcactcgtctttttatgtaaaccatgctgaaataacgatgtcttgcttacaccgcagccatggcggccagaacgctctgccaactcttgctgcgtgcggcaggtaccggcgcggggtgggtgcgccgtgtagcaggggcactatgacctgtcgcagaggataccgtcagggcaggggaggggcagaagaacacagcagtgtcctttgccagccactgcgcagccagagcagcggcctgcgggtcagactgcaacgcgcggcgctcgttcccggccagaaaatcagccagccagtacaaaattgcgcccagcggcaggcagggggaagcgtcctgattccagtagctccagcgtgcaccgcagccaaggtgactttccactgtgatctgtgcgccggtgcgggcattctgcgggatggagccaacatagttggtcccggcgcgctgccccagctcctcaataaggcgctgggtgcgggcagcatccagccgatcctcccggcagtaggcgcggaagtcggtctggctcagcaggctgtcggcgctggacggaaaacgcccggtcagctgcccatccgcattgtggcacagttgccagcctttacggaacagctggaaattcaggcagcgccgccccatggtggagtagcacacaagggcgctttgctccccgggtagctgttttacttcaagataggcatcgttgccgcaggtatcctgcaaacggacggtaagcagcaactgtgcaccgacgtgctgggtggacatggcgttgtgcatggcgtcaaaataacgggaagcgtccatgattgatctccttcctatagcaattcaactttttaatgcaacagcaacaacgttgaattgcatatcgcaaatatgctgtttgaatgctgcactaatttcttgccttgcgataaaagcaaacagcgaaacgttgtaaaagcgccagccgggtgatcgggccgtcaggctgcataaaacttctctgaacgtagtatagcatacttttggatgaaaaacaactgtaagttttccgaaacaacaaatttttgcaaaaatctacagcgcattgcaaacaaaagttcaaagtatggttgtgcactgagatgtgcggttgtaaaaaatgacccctgcgggagatgccggctaaggccggaactgctcccacaggggtcgttttgttttttcagtcgccaagttcccggatctcgttctggatcagccgtccggcagcgcgggcaagctgatccatgccgcggatgcgtgccatatttttgccgtagatctgcgcggcggcaccggcgctgctgtcctcgcccataaaaacggcagacacccgcacgccctgccgctgtaaggtgcgcacctgtgcggcggtatcggctacaccggcggcgtcctcgtaggcgcagcccagcgggttctccgctgtgggcgggatgcggcggctgtcgttggggctggcatcggtcagcaggatcatcaggtggcgcggggcagggccgggggcataccggatcaaatcacctgctgcccgcagcgccagaccgtcccggttccagcctgaggcgaagtaacggaagatattctgccggtttttgtccgcaaagcctttcagcacccgtagcacggtatagccccgcaggctgctgaaggcgcttacccgcaccggaatgccgcagttagccagactttcggccaatatgacaccctgcgccgcgatcacctcctgacagtgcaggcgggatgcggaggcatccagcagcagatccactgtaaaggcggggcagttctcctcctccgggcacaaaaacacccggtcatcgttcaggtaaggggcacgccacacccgcccggcgcacagatcaccgctgcgcgctatccgctggtcgggctgctgatgcaccagaatgcagttgcggatctgctcggtaaggcgcagcaccacgctgcggtgcagctcctgatttttggcatagtaggcgcggttgcgttcggcctgcaattcggcctgctgtgccagctgccgtgcctccggggtgggtgcctgcgccgggctgggtacaccggcgctgaaccacaagtgacagcccagatgcaccccggtgcacaactcctgctcggccttgcgcagctgctccggcgggtagaagcagcgcccgaagcagctttcaatgtaggcgcggtcctgcgcggcgcgttgcttcagagtaatgtttgcccggcgcttgtccaccgccagcccgctgcctgcggcatccaccgcgccggaatgctccaccgtcacccggtcggtcttgatcatctgggtgggcatggctttggtagccagctttgcccaaaagccctgtagccgcaggtgcagcgcgggcttttggcgcaccttgccgtcaaacagggcaaattttgcaaacagcgccagcaggtcgtttttgagctgtgctggctccggtatgttctccggtgccagcgctgcggcaaggctgctctcgtaaggagtcatgaccggagcggtgcgtcccagcaccttgcgccagcgtgcagcctgtatggtgtacaccagctggtttttcgccatccactcctgccgcgaaagcttgtactgaatggcaaaaaagtagtccgcgtgggcaaaccgcagcgcttccagcaccgggcggcggggcagctccagccggtaggcggcgttttctaagtacagccacgccatatcgtccagcatgggctggcgcgtgtcgccctcccatgcggaaaaaatgtcccggatcagcgcgtcaccgtagtatttgtgcaccagccccacgatgcagttcatgtaaaaatcaatggtgccgtctgtgttgcgggccagaaacagcggctcgaaaccgtaagcaccagcagcggcccagacctgattggccgcacgccgctcctgcgcggtgtagctctgggcgtccatcaggcaaacagctttccggcatccagcttggccgggatgcgcgcggcgatcacgtcccggatcagtccctgttcgtaggagtcaaaggccttgttggtgatgcccatatccagcgccgccccggcggggatgcccctgcggatcagccgcagcgcgtccagcataccgcgcagatccagcgccttggtggagatctcggcactgtcgcactttttctgcaggtccagaaacagcagcgcaaactggtgcacatactttgcggcaagatccgggaactgcgcccgcagcagcttttccagattatcctgcgtgatggtgggcatctgcaccaccgcaaagcgggaggtgagcgcttcgttcagctcccgggtgcccgcgtagccgtagttcatggtggcgataaagcgggtctcctcagccagcggaatgcggtcgtacccgggcacgtcgatggcgcggcggaaatccagtaccgcgtgcagcaccgccagcgcctcgtttttggccatgttgatctcgtccagcacgccgaagccgccgcactgtgcgcagcggtacaccggcccgggacggaacaccacctgcccgcccgcaaaggtatccatgccgatgagggaggcggcgtccatgtttacatgaaaggagatgtcccacgcggggcggccaaaggcggcggcaagattttctgccagcacgtttttgccggtggcctttccgccggccagcagcaggttttcgccgcagaggatagccgccagcgcctgctcccacacctctttgccgtagtagataaaagcaggggcggggatacgcgggcgcagcgcctcgctgagcgtatgggcggcgcggtattcctgcaccgccgtaagcagggcggggtccaccccttcctgccgtaaggtatccagaatatccgacatttgtacaaacacctcgatctctgaccgggtgggatgaactgcccggttttcagccttatcatagcacaatcgcgggcatttgtgtagggggcgtgcgggcaaaaaggcaaagaggggcagccccggccttggggctgcccctcttcacatgaaaaagaagaaaagaagaaacgcttagaggatgccggagaactgcgctttatcaggcgttttccagaccggccatctgcttgatggccttcatggcgaaggtcagggtacgacccatagccacaccggccatcaggcaggggtagttgttggcaaagaagctgccggacatatcgccggtgatgtacagaccctccatgggctggttgttggtgtccagagcctgacccttttcgttgatggcaatgccctgctcggtggtcagcagagaagcacccagccagcagccgtagaagggcgcggtacggatggcgctcaggcggtaagcgggcttgccgaagtcctcatcgttctgcttatcgtacagctcattgtagcgctccacggtagcaaggaaggtatccttggcagcgccggtaaagcccatcttgtcggccagctcgtccagagtatcgcacttgaacaatgcaccggcctcgatagcctcgtccatcttgccctgaatgtacttctcaccgccgttgcgggtctgggcagagcagccgatggtgtggaaacgctttgcgtcctccaaaatgttggcatcgcagatctgtgcgtagacgcggcccggctggtgggcggcagcgtagacgatatcgttgtaggggcagctctcgttggcaaaacgctcgccgttgcggttcaccttcaggaagggctgggtgccgggattatactggcggatcttaccggggaaagccttgccgccaaaggcagagtcgctgtccacataaccggcatccacaccgggggcaacaatgccgcggtcaaacagcatgggagcggcttccttgtccagattagcgcctgcccacactgcggcgcggataccgtagcccttgtcggcgggggagtaggagcaggcggtggtcacgctggtgcccagcgggtccagctgctccatcatgtaggggttgccggggaagccgccgcaggccagcagcacgccctgattggcgttgtaacggatgaagtggtcatcctcggtgctctgggcgatgacgccggtaatgcggccatcgctgttcttttccagcttggcaaggctggtcttgaagtctacatcgtagcccagctcctgaatgtactgcagcagcagctcgttgcggggtgtgccggaagcactctcgctggccatgtagttgtgctcctgcacagggtagaggtagtcggtgttgtgctcggcattctctgcgggccatgcagcctcgctgccggaggtgaaatcgcacacccagccgtacttatcctccagaatgctgcgcatgaagtcgtgcatggcggcagactcattgatccaggttttgacaacgcgctggtcgcacttgccggaggcgtagcgggagatctcgctcagcagctttgccttatcggtggcgggttcgccagcctccttagcggcagcagaatcaacagcgccgtaccagtgacgggtgtcctgcacgttggcgttctgctcgataacacggaagttcaggccgttggcagcagcataggcggcggcgaacataccgccgttgcctgcacccacgatcaggatgtcggtgtccacggtctcggtgatggcggtctcgtcgatgtcgggctcggtgcccagccagtcgttctcatcgccggtgggcagctgaacgctggagaccacggtctcgcccttggcctgtgcgtagcaactcttggcggccttcatcacggcatcggaggtgatggtggagccggaaacaccgtcgatctcggcagaaccggcagccagcagctgctcgcgcagctcgtcggcagcggcagcgccgaaggaagcggtctcgccggaggtgtccactaccacatcggtgacagcgctgtcggagaaggtcatggtgaccttgacggtggaggagataccctcggcagtgccttcgtaggtgccgggaatgtactgaccggcagcaccggaggtggaagcggaagcagagccggaggcggcattgcaggcagccagagcaccggcggtcacaccgctcatggcggcggcagcggcgatcttgataaagcccttacgggagatcttgttcataggtacgctctctttctttttattcttctttgtgttccttcttatcctgcagcaaggtgaaaggtactttgctgaatccttaacaattgtagcgtagaagggtgctgtttacaattcatattttttatattataatttaggataacctaatgtatcgcgggagggagaaacgcatgaacgagagcgcactggaaggctttgtaaagatcgtggaaatgaacagtttttctgcggcggcagaggcgctgtatctttcacagtcggcactttcgcagcagatccgcacgctggaagggcaattgcagttcgagctgttccagcatgtgccccgccgggtggtgctgactccggcggggcaggatttttaccccaaggcaaagcagctggtagtcctgtatcagcaggcggtgcgccatgcccgcgcggtgcagcagcaggaaaacccgccggaaagacatctgatcatcgcagggtgtcatgaggcaatgcggatgttcgcatacgacctgttttccctgacgagtgacttgtgcctgcggtatacccccattctggggtggtgtgccaaccgcagcgaggtttggcgcagcctgaaaaaaggggagatggatctttccttccagctggaaagcgcagaattttacgcacaggggcttacctttgtgccgctgctttatgtgccggagctttgcatccccattcacccgcccgccgatatgccagtgggcaggctgactttagagcaggcattgcagtaccgctggctgcttatcaaggagatgtaccagaccgtttacgagacaagtctggtgcaggaggggctggaacgcggggtgagttttacgccggtgggcggcatccgcagtgcagcctacggagacccggcgctcaagatggtcccggcggtctattaccgcagacccgaccttagctttgtacgggtgctggactggggcaggggacaccggtttggcatcgtgctggggcaaaagcgcgaggacccggtagtaatggcttatgtccgcgcgttgcagcaacagctgccgtccctctcggaaaagctgttcggcttgaagctggaaccggtggaggaataaaaaactcccccagtcgcctgcggcgacagccccctcggagatggggcctttggcataacggtgcagttttcggtaaaacataaaagtgttccttctcgccagaggctccctctttgagggagctggcaaagccggtaggctttgactgagggagtttatacaaaagagcacctattgccctaaaaaggcaacaggtgctctttttgcggttatattgcgataacaggtgctttaatccacaacatcctcgaactggctgttgtacagatcggcgtagaagccgccggcttcaatcagctggtcgtgggtgccctgctccacaatgtcgccgtcccgcatcacaaggatgaggtcagcgtcccggatggtggaaaggcggtgggcgatgacaaagctggtgcggccctccatcagacgatccatagcggtctggatacgctgttcggtgcgggtatccacactgctggtagcctcgtccaaaatcaggatgcggttatctgccagaatggtgcgggcgatggtaagcagctgcttctgtccctgactgacgttggaggcgtcctcgttcagctccatctggtagccgccgggcagggtgcggataaagtggtcggcgttggcagcctttgcggcggcaatcacctcttcatcggtggcgtccagccgaccgtaacggatgttctccatgatggtgcccttgaacagccatgtgtcctgcagcaccatgccaaaaccttcgcgcagggcgctgcggtcaaagtcccgcacatcgtggccgttcagggtgatggaaccggcatccacatcgtaaaaacgcatcagcagcttgaccatggtggtcttgcccgcgccggtggggcctacaatggctaccttctggccgggctgcaccgtgcagctgaaatcgtggataacggtcttgtccggggtgtagccgaagcgcacatggtcaaaggtgacctgtccgtcaatgtcggcggggtcggcgcggtgggcggggtctgccagctgctcttcctccggctcgttcaaaaactcgaacacccgctcggcagcagcggccatgctttgcagcatattggacacctgcgaaagctgctggatgggctgggtgaagtttttgacgtactggataaaggcctgaatatcaccgatggtgataacgccgtttgcggcaaaaatgctgcccacgatagccactgccacatagcccaggttgcccacaaagttcatgatgggcatcatcaggccggagaggaactggctcttccatgcggattcgtacagcttatcgttggcggcgttgaagtctgccagcaccacggcctcccggttgaaggccttgactacgttgtgaccggcgtaaatctcctcgacctgaccgttgaccacgcccagcgtggcctgctgcgctttgaagtacttctggctgaacttgaccaccaccagcaccagcgccagcgacaccggcaggatcagcagggcgatcagggtcatgcgggggctgatggagagcatcatcaccagcacaccgatcatggtggtcacgctggtgatcagctgggtgatgctctggttcaggctctgtcccagcgtgtccacatcgttggtgatgcgggagagcacctcgcccacggtgcgcttttcaaagtacgccagcggcaggcggttgatcttttcgctgatctggcggcggaagtcgtagcagaccttctgggaaaggccggtcatcagccagccctgaataaagctgaaagcgctgctcagcaggtacatccccagcaaaaacagcaggatgcggccgatatacacaaaatcgatgctgccggtgccgcgcagccgggcgatccagccggtggcaagggcggtggtggcctttgccagcaccttggggcctgcaatgttgaagatggtggacagaacagcaaacagcatggctgccgcaaggggcagcttgtagtggctcatggtgcggatgatctgccgcagcgtgcctttaaagtccttggcgcgctcggtggtgggacgtccgggtctgggcatatcactcaccctccttttccgtattcaaggtatccagcgccagctctttctggctcagctggctgcgggcgatctcctgatattccgggcagctgaccatcagctgggcgtgggtgcccttgcccaccagcctgccttcatccagtacaagaatctggtttgcgtgcagcacggtggagatgcgctgtgccacaatgatcacggtggcgttgtcggtctgtgccttcagggcgcggcgcagggctacatcggtcttgtagtccagcgccgagaagctgtcgtcaaacagatagaccttgggatttttggcaattgcccgggcaatggaaagccgctgcttctggccgccggatacgttggagccgccctgtgcgatggggctttggtagccctccggctttgcttcaataaaatcagtggcctgcgcaatggcagcagctttttgtacctgcgcatcggtgatatcttcgccgccgaatttcaggttgctgtcgatggtgccgctgaacagcacacccttctggggcacatagcccagcaggtcgtgcagctgtgcctgcggcatcttgcgcacgtcaatgccgtccacagtcaccttgccgccggtcacatcgtaaaagcgggggatgaggttgagcaaggtggacttgccgcagccggtggagccgatgatggcggtggtctcgccgggctttgcggtaaaactgatgtgctccagtgcatcgctgtctgcaccggggtaacggaagctcacatcctcgaactgcaccacgccctgccagtcggtgtgtgcctgtgcggcctttgcggcggcttcatccgggtcgtggatggtggctttggtgcggatgacctcgtcgatacgatctgcagccacaccggcgcggggcagcatgacggccaccatggccagcatcaaaaaggacatgacgatctgcatggtgtaggtgataaaggcgatcatttcgcccacctgcatggtgccggcatccatagctttgccgccgaaccagacgatgagcaggctggtaccgttcatgatcagggtcataaagggcatcatggccaccatggcacggttggtgaacagctgggtgcccatcagctcccggttggccttgtcaaagcgctgctcctcaaacttttcgcggctgaaggcgcgcaccggcatgatgccggtcaaaatttcgcggctgaccagattcaaccggtccaccagctgctgcatcaccttgaatttgggcatggcaacgctcatcaggaaaatgatgagcaacagcaggatggccacgtccagcaccacgatccaggaaaggccggagctgctgcccacaacgtgcagcacaccgccaatgcccagaatgggcgcataggccaccatgcgtagcaggatgacgcagacgaactgcacctgctggatatcgttggtggtgcgggtgatgagggaggcggtggaaaaattctcaatctctgcattggaaaagccgatgacgctggagaaggtctcccggcgcaggtcacgaccgatggcagcggacacccgggaggcaaggaagcccacggccacagcaacgaccaccatcagcagagtaagggcaagcatctggccgcccacccggaagaggtactgcatctgcacattccgtgcaacgccctgtgcctcgtattccagctgcaccagcagcagggactggcttttcaggttttccagcagggtgctgtccagctggctcatggcactgtccagctgcttttgcagcatactgcggtcaaaaccgggcatctggctcatggcggcaaactggctgcataccgtatccagatctgctgccgtgggggtaacggtctcggtgtcggtgtccgcagcggcagagggcatctcggcaaggccggtcatgcccatgctgttctgcccggcgggggtgttggcggcctgtgcggcagccatatacagcacgatgtccggggtggtcacggcatcttccagtgcggtgcgctcgtcctcggtcaggtcagagcgcagctgcagcacgccatcgtcctgcaggtagtactggtaggcgttttgcagcttttgtgcatcctcttcgctcatcagcaggctcagcgtgtccagcgtgctcttgcgcaccgtctggggcaggggactttcaatgccgccctgctggatgccggtgtccacgatcttgctggtgtagtctggcagtgcaaggtcgcagtacgcctgcacgaacagcagcgcgaacaccacaaggcagaccgcccagtgtcgggccagctgcttaaagatctttgtcatggttcgtttctcccttcgggtcaatgttgcgcgcggcattttccgcaagaatggcatccatcagcgcgccgcgcagcgcgtccatctgggctacctgctccggctctaaccgtgccagcacgctggcaaagtagtcgcacagagcctgctcacactggtggcacagctcataccctttgggggtgacgcgcaccagcgttttgcggcggtcggcggggtccggttcccgcaccacagtgccgtcctgctccatcagccgcagcccgcgcgagaccgccggcagcggctgacggatctcccgggcaaggtcggagacataaatggcaccgtcctttccgtggcagttgatggaatgcagcaggccttccagcatattaaaatggcatttggggcaatcggccagcgccgcccgcatcccggccttggatgccttgctcagctgcccgatatagtggcacatcccctgaaagctgggggtgcttggctcggacataacagttcctcctcgtttgcatttcttaatacttaacagctgttaagtattaacgcttgataagaatattccttttgcagccggattgcaagaggatagggaaatattaaacaaaaattcacaaaaaacttgtaggctttgtcaatgcgcaaaccggctctcgctgcataaaaataaaggacaggcagaaacggagggtgcggatggagcagggattccaggtgctgttacaggtgttcggcggcttggcgctgtttttatatgggacggacagcctgtgtcgggcggtgcagcagggagcgggcaggcgtctgcgcggcctgctggcgcggtgcaccgcaaacccggtggcggggctgctgaccggggcggcggtcacggcggtgctgcaaagcagctcggcggtcacggtcatggtcattgcttttctggcagcggggctgctgcagctgcggcaggcggtgccggtggtgttcggggcgaatatcggtacaacggtcacagcacagttgctggcgttccgggtggaaagctggcggtatctgctgctgttttgcggggtgctgctctgtctggcctgcaaaaactggcggggccgctgcgtgggcgaggcggtgttcggctttgggctgctgttcgagggcgtcacggtgatgcgcagcgccatggagccgctgctgcaaagcccgttgctccggttggagcttgcccgggtgcagcaaagccctttgcatgggcttctggcgggcgtctgcatgacactgacagtacaaagcagctctgccacggtggcgctgctgcaaagcatggcggcgcagcccggggcggacggcgtgcacagcctgctggggctgaccgctgccattcccattctgctgggggataacattggcaccaccgttacggcggtgcttgccgccatcgggcagggaagagacgccaagcgggtggcggcagcccacgccatcttcaacctgagcggcgcggcggtgtgctgcgcactgctgcagccctttgcggcgctggtgcggctgtgctcgcccacaggggcagagtgtgccgtgatcgcccggcagatcgccaacgcgcatactctgttcaacgtactgtgtgcgctggtctggctgcccctgaccgggcagatggtgcggctggtctgcgcgctgctgcccgataaaaatcgtccgaaagaacggttgtaaaccggagcggggaatggtatactgaagcagacggatactattatataaagggtggaatgcaatgaaacggaaaatcggcaggctgtgcatggtgctgggtgcggtgctgatcttgagcgccgccgggctgctgggttacaaccggtgggatgccgcccgggcagaaaaggcttcgcaggaagtattgggcgagctggagcagaccatgcaaaagaccattacggagcaccggcaggaaaacgagaccgcagccccgcagccggtgctggacccggcgcaggagatgaccaccgtagaggtggaggggcatgactacatcggggtgctttccatcccggcggcagggctggaactgccggtgatggcgcagtggagctacgccgggctgaaggtcgcccccggacggtacagcggcactacctatgccgatgatctggtgctctgcggccacaactacgcaaagcatttcagtcccatcaagtggctggcgatcggcagcccggtctactttacggatgcggatggtctgcgctggagctacgaggtggagagcgtggagactttgcaccccacccagatcgaggagatgaccaccgccaccgagacagacagctgggatctgaccctgttcacctgcacctccggcggcaacgctcggtatgcggtgcgctgtgtgcggacgggctaccccgtccgggtgacggatgcggcagagtgatgccatcttttgcgggacgggacgatttggaatgcccgccgcgtgtgctttgggcatgatcagcggaaaatatatttttatcgcaattttcaaaaatagtgccaatcaaaacggcagctttgcgatatgcagtttgcggatgttgcttgtgcattaaaaacgcaaactgctataatttcgggatagcggagcgtctgcggacgctccgctatcccattttcacgggagggggtcgtgatgaaaaacggcagctccggtgcctgtttcctgcggaaatgcggcgctgtgaagggaaactgccaaagacccgatttccaaggggggtggctgcggacagggtgagcagaccgtgggaaatcatccgatttttgcgcaaaaagtctgcaaaaacatttgaaagtcctttttatagtatccttattgtgcgatactgtgttcaccggggaagtcccgggaataaaacagacacacaggagggaaacaccatgaaggattttgagttgcgttatgtgggcagtcatgtggaggtatacaccggcagtggtgtgttcctgttttcggccgatacggtgcgcgaggccatggaagagctggccgggtaagcggagacataccgcatccgagatggtataatgtaaaatgtatgtaaaataacggaaagctttttgtttgccacccggaaatatgttgcggaatgtgtgaaaaaagtaattttcgtgtaaaataaaccttgttgagacgccccctttgatggtataataaaaataagcggctgccggaacagggcaagtgctgtgcacgtgcaaggtttcggcagctgtgtgctgtaaaggataaaaagggaagtttcatattaggagtatcgttatggatatcacacacattacctctctgctgggcggcgttgcgctgttcttgtacggtatgtccatcatgggcgccggactggaaaagctggcaggcggcaagatgcagggcgtattgcaaaagcttacctcctctaccatcaagggcgtgatcttcggcacactgatcaccggcgtcatccagtcgtcggctggtacggtggttatttgtgttggtctggtcaactccggtatcatgacactgacgcagtcggtaggcgtgatcatgggtgcaaatattggtactacggtaacaggtcagttgatccgcatggcggatatctcaggcgacagcctgtggctgaccttgatccagcccaagacctttgcccccgtggtggcgtttattggctgcattttttatgtgttcctccgcaatgccaaaaagaagaacatcggccagatcatgctgggcttcggtatcctgtttaccggcatgagcctgatggataccggcgtggcacccctgcgggagagcgcagtctttcagaatctgttcgtcaccatgaccaaccccattctgggtgttctggtgggcgtggtggtcaccgtgatcatccagtcctcctccgcttcggtgggtattttgcaggcactgtccagcacagggcttgtcaccttcagttctgccatccccatcattctgggtgcgcatatcggtacggcgttcaccccgctgctcaccatcggcggctcttccaaggatggtaagcgggcagcgctcatccacctgtacttcaacgtcatcggcagcgtgatcctgctggcactgatctatgcggtgcagtttaccatcggcatccccatgtggggcgatgtgatgaacaagagctccattgcaaacatccataccatgtccagtgtatgcgctatgctgctgttcctgccttgcagcggagtgctgagccgcttggcgatgctcacagtgcccagcagcgtggaggaagcacaggagctgagcatgccggtgctggacgagcgtctgtacaagagcccggctgtggctttgcagcaggctaagaacgcggtgatcaagatgtcccgccgcgccgcccgcaacgtgggtctggctgcgccgctgcttttgaagatggacgaggagaccgtgagcgccatcaaggtgcgcgagaacctgatcgaccgtatggaggtggagatcaccaactacctgatcaagctgaccgatcaggaactgggcgacgacgagagccacgcggtgaccgagctgctgaactttgtcaccgagttcgagcgcattggcgactatgccgtgaacatcatggaaaaggccgaggaactgtacgacaaggaagccagcttcagtgagagcgccaaaaaggagctgcaactgctggacgccgcattggagcgcattctggttctgacggatgaggcctttgaaaacgatgatacccagaaggctgcacaggtggagccgttggaggagatcattgatgtgatggtggagcgtctgcgtgaccagcacatccgccgcctgaaggacggcatctgctccatcgacaccggcgtggtgttcctcgatgtgctgaacaacgccgagcgtatctctgaccactgctccaacattgcggtgcgcatggtgggcatggaggccggcgatgattacgactcccacaccctgaaaagcattatgcaccacaaccccagcaaggactatatgctggaatacgagcagtgccgcaaggaataccttgtgccgctggaagaaatggaagcttgaatcctataaatgcaataggccgctgcacatcgtgcagcggcctattgcatttattcccccagatcctccagcagcaagtccagctcccgggggctgttgaccacaagcccgcgcttgatgcgcaaagcgtcgttttccggcagaagattggtgtagatgccggtcacgcggatcaaagtgcccggggtgccgtcggcgcggcaggtgtacaccgccacccgcccgccgctgtcccgcaggcagtagcgggcagcgtccgtctggggcgcagcctgcgcggcaaggctcaggggagaggcgggatcggtctcggatccggcggggctttgggacagcggcagctttggcagcgccatccagaacagactgaatacaatggtgaatacgcaaagcccgtagaacaggcagacagacagcttgcgcataaaaaacactcccttccccggtaagtatgccccatttgggcggatggcagacaattttcacacacgggcactgtactttccgtggcggagtgtgctatactatttatatctgctcagcgcgcaaagattggttcttgcccggctggggcgtgcgtgctataatatggtattgcagtttgaagtttcgtgtcacaaacgatgtggataaagcccggcgcagcaatgcccggcaacagtcttgaaatgtcaggaggcgatccctatctccaacaatgagatgagaaagatccatcggggcggcgaggagcagcctgcccgcccggtgggacgtaaggtcaatgtttcccagagccgccgcgaggtacactccgcagcggaaaaccgtacccgcgcacccaaagcacccaaaactcccaagccgccgaaggaaaagagcaaacacccccttctgcggttcattggccgcacccttgctacggtgctctgccttggcatcatgctgggcagcgtggtggccgtgggcatggtgttctatgtggtgcaggctactgccaacgacggcgacctgctggacttggacaacatccagttgagccagtccagtatggtggtggctaccgacccggataccggcgcacaggtggagtatgccaccctgcgctcttccaacagccaccgcgtgtgggcagaccttgagcagatcccttccaacttgcagtatgcgttcatctgcaccgaggataaggacttctactcagagcccggcgtcaacttcaagcgcaccatcggcgcaatgatcaacgagtatctgctgcctatttacagttccaagcagggcgcatccacgctggagcagcagctcatcaagaacctgaccgatgacaacagtgccagcggcatcgatggtgcactgcgcaaggtgcgcgagatctaccgcgccctctgcctgagccgcagctactcgaaagaaaccattctggaagcttatctgaacaccatcagctttaccggcaccattcagggtgtgcagacggctgccaacgagtacttcaacaaggatgtcagccagctgagcctgtgggagtgcgccaccattgcatccattaccaaaaaccccaccaactataacccctatacgaaccccgaaaacctgatcaaccgccgcaacttcatcatgtacaatatgtggcagcagggcgtgatcagcgaggaggactaccgcaacggcgctgcgcagccccttgtgctggccgaagaggacagcggcaaaaagcccagcaccgtcacttcctacttcaccgatgcactgttcagcgaggtcgtgcaggacattatggtcaaggagggcatcagcgagtccgaggcgcagaagctgctctacaccggcggctttaccatcgaagccactgtcaacaccaagctgcagtcccagatggagaacctgatgctgaacaccgacgatgcctacttcccggcgggctggcatgaggaagaggttacctccatttcggacgatgatgtgcaggtattcaacgaggacggcacccccaagacccgcaccggcgaggacggcaccgtctactattaccgcaacgtgcgcacgcaggctgccatggtcacgctggattatgacggcaacgtgctggccattgcgggcggcttaggcgaaaagaccaagagcctttccctgaaccgcgcctacaacgtggagcggcagaccggctctaccatcaagcccatcggcgcctatgcactgggcatcgagtacggtctggtcaactggtccaccatgctcaacaactcccccctgtaccagaagcaggatatgatcatccgggatgaggactactgccgcaagaacggcttgatgggtctttccgataagcagctccgtgcttaccccaacgcatggcgcagctggccgcgcaactacggcggcaactacggcgatggcagcgatctcccgctgtggaacggccttgcccgctcgctgaacaccatcgcgatccgcgtgggcgaccttgtgggcgcaagcaatatcttcaactttgtctacaacaccttacagctgaatacgctggatcccaccaacgatgtgggtctggcgcagatggtcatgggcagccagaccaagggcgttacccccatggcgctggccgcagccttccagatcttctatgatggcgagtacaccaccccgcacctgtacacccgtgtgctggaccgggacggcaacatctatctggaaaacaacgccaccagctatcaggcgctgacccccgatactgcctatgttatgaaccgtctgctgaagaacgttctgttctccagtgtgggtactgccagcggtcgttatcccaactccaacggcatggaagcctttggtaagaccggtactgccagcgacgaaaaggatctgtggttcgtgggcggcacgccttactatgtcaccgctgtgtggtggggttacgatgcaccttacgatatgaccaagaccctgtccaagcagcaggccaagacccgtacctgtgtgactgcgtggaaggcactgatggagcaggcacaggcagacctgccctataaggcattccccacctccgcaggcgtggtggagcgccgctactgcacccagagcggccttctggccggtgcgggctgcccgagcactgccgtgggctactaccgtgccgatgacctgcccgatacctgcacctactcccacgcagccccgcaggctgctgcccctaccgagaacacagacgatgctgtgcccacccaaccggtcgtccccaccgacaccagtgcgctggatacggaataagggcaaaaatcgtactttttcgcccatttgctgaaaaatccggcaagggcagggcgcactttacaagacaaaactggacaaagtgacaaaatagcatccgggctcttgcattgcaggggttcggatgctattatattttctgcaagaacacttgtgtttgagaggtgaacaagttggaacgccgtttttatctggtagatgcgcaggtgctgccggaggtctttctcaaggtggtacgcgccaaggagctgctggccagcggagaagcccgcagtatttcagctgcgacccgtgcggtagagctttcgcgcagcgcattttataagtataaggattgtatctttgattccgagaacggccgtgaggtcatcacggtcatggccaccctgcgggacgagaccggtgcgctgcaaagccttctggcaggcatcagcgccgcaggtgccagcattgtgaccatcaaccagtccaccccggaaaacggagctgcgctggtggcggtcaccatccgcaccgatactatgcagatgtccccggaggaactgaccgaaaagctttcgcgccagcgcatggtcgtgggtgtgcgctgtgggtataacctgtaacaaaacaggaaacgagggaaagagagtatggctaaaattgcaattctgggctttggcacggtgggcagcggcgtatacgaggtgctgtgccgcaatgctgcaagcgtctcccgccgggctggcgaaccggtggaggtaaagtacattctggacccgaaggactttaccggcaacccggtggagcctttggtggtaaagaacattgacgtgatcctgcaggacccggagatccgggtggtggtggagaccattggcggcacccgctttgcttacccctacgtcaaggcgtgtctggagagcggccgcagcgtgtgcacctccaacaaggagatggtggctacctacggcgcagagctgctggcgctggccaaggagcacgactgtgccttcctgttcgaggcttctgtgggcggcggtacgcccatcatcacccccatgcaccagtgcttggcggctaacgtcatcactgaggtggagggcatcgtgaacggcaccaccaacttcatgctcaccaaaatggtgcgggagagccttggctttgaggatgcgctgcacattgcgcaggagctgggctacgccgagaccaaggatcccagcgatgacgtggacggccgcgatgcctgccgcaagatcgccatcctgtcctccatggtgtgcggccaccagatctacccccagaacatccccacccggggcatccgcgccattaccgccgccgatgtggccagcgccgaaaagctgggctgcgtcatcaagctgattgcatggatgaagcttggcaaggacggcagcgttgccgccggtgtagagccgtgtctggtgcccaaggcaaaccagctggccagcgtggacgatgtgttcaacgcggtgctggtcaagggcgatatgctgggcgatgtggtgttctacggcaagggcgcgggcaagctgcccaccgccagcgctgtggtggcagacgtggtggacgcgctgaaaaacggcgcacaggtgcacgacagcctgttctggcagcccgcagacccggtggacggaatgctcaccgacccggctcccgctgcatattatgtgcgtgtagcgggcattgcacccgctgtggtggaagccatctacggctacggcaaggtggtggatgagcggtacgagggctgcgcctactttgtggagcgcgccgatgagcgtgcgctggcagaagccgcgcgcaaggtggaggccgtgggcggcagcgtgaagctggtgctcaagcgtctgcccgaagaagtgtaacggaaaggaactgcggcaatgaagatcaaggtttcggttcctgccaccagcgccaacgtaggctccggcttcgatgcgctgggtctggcagttacgttgtacaacacagtcacctttgaggacagcgaggtgctggagatctcagcatcggacggcacccgcatcccccggggcgagtcgaatctcgtgtaccgctccgccaagggtctgttcgaaaaagtgggcaagcagatcccgcccctcaagatcacccagacgaaccccatccccatggcacgcggtctgggctcatcttcggcctgcatcatcgcaggtctgctgggtgcaaaccggatgctgggcgatgtgctcaacacgcaggagctgctcacgctggcaactgccattgagggacaccccgataacgtggctccggccctgctgggcggcctgaccagcagcgtgtttgaggacggcaaggtgtattcggtcaagcggaatgtggacgaaagtctctgctttgccgccatcgtgccggactacaagctgctgaccgaagcagcccgcgcggctctgcctaaagaggtatcccataaggatgcggtgtataacttgtcccgtgcggcgctggtgcccgcagctttctgcgagggaaggcacgacctgctggccattgccactgaggataagctgcaccagcagtaccggatgcccctgatgcccggctcccgcgaggtgttcgatatggcgcggctgtgcggcgcaaaggccgtgtatgtctccggtgcaggcagcacggtcatggcagtggccgaaaaggccgaggccgaaaagttctattccaagctggaaaaaggtctggagctgctggaaggtctggacggatgtgaagcatttacactgttgcagctggatgccgataacaccggcgcgactgtggaatgataaacgggtaagggaagtgcaagaacgcttccgcccggcaagcccccgcaagcgcggggcgtaaagaggagagtgacaagatatggcgttgatcgtacagaaattcggcggttcctccgtaaaggaccgtgaccgtatcttcaacgttgcgcggatcgtggccaacacccacaacgcgggcaatgacgtagtggtggtagtttccgcacagggcgacaccaccgatgacctgatcgccaaggcaggggagatcacccataacccctcggcgcgtgagatggatatgctgctggcctccggcgagcagatcagcatcgcactgctggccatggcgctgaacgagctgggctgccatgccatcagcctgaccggctggcaggcgggcttccgcaccgaccgtgcctacaccaaggcgcgcatcacccggctggagaccgagcggatctcctcggagctggagcgcaaccgtgtggtggtggtggcaggtttccagggcttgaacaagctggacgatatcaccacgctgggacgcggcggctccgacaccagtgctgtggccattgccgctgccctgcacgctgaccgctgccagatctatacggatgtggagggcgtttacaccgccgacccgcgcaaggtgcgcaacacccgcaagctggaggagatcacctttgacgagatgctggagctggcatctctgggcgcacaggtgctgaacaaccgcagcgtggagctggccaaaaagtacaatgtggagctggaggtgctctccagcctgaaccccatcccgggtacggtggttaaggaggttacaaaggacatggaaggtatgctgatcaagggtgttgccaaggacaccgatgttgctgttatcacgattctcaacgttcccgatgagccgggcatgagctttaagatctttggtctgctggcacagaagaacatcaacgtggacatcatcctgcagtccaccggccgcgatggcaagaaggacatcagctttacctgtgccgagggcgaagccgaggtggccatgcgtgtgctgaaggacagcgcacacttcagcaatgtcagcgtggacaccacctgcgccaaggtctccatcgtgggtgccggtatgcagagccacagcggcgttgcttccaagatgttcgaggcactgtccaacaacaatatcaacatcaagatgatctccaccagcgagatcaagatctcctgcatcatcgaccgtgcagacgccgacaaggctgtcagcgccatccatgatatgctgtttgactgatctgcgtaaaattttcggttatggcctgtctgctccctgccgggggcgggcaggtcataatttttttacacacggcggcgtttacacaaattgcaaaggggtgtataatatagtttgaatctgtgcggcgcaccggcgctgcaactatgccgaaaaggagccccgccgcatgagtgaacccacccgtacctccagagcgcctgctgataagcgcctgacttatcaacaatggaaacgccgcaaaatgctgcggctggcccgcaactgggtgctgtttctggccggctgcgcggcagtggtggcgctgctgaccggcggcatcctgtggctgctgcccaaggtgcacggcctgctggccgggccaaaggtgtttgcagccagcgtgtacgacggcacggattatgtattcgatgccgcagacgcgcggcttacgttggtgaacgccaacctgccctatgctgccgagcctgccccgctgctggacaccgccgatgaaaccaccggccagcagctggaagtggaagccgccatgcagtaccgcagcatggccgccgccgcgcaggcggacggcgtcagcctgacccttgtggccggttatcaggacgccgacacccggcaggatgcctatgaagcccgggtgcagacctaccgcgataagcgcaagagcgaagaggaagccgcccgtctggcggctaccatccagcccgctgccaacgccaacgagcacggcaccggctacgcggcagatatcctcagcgcggacgacccgcagcaggataccagctttgccgagacccgtgcctacgagtggcttacggcctatgcggcggaatacggctttatcctgcgctacccgcaggacaggcaggccgccaccggcatcgtgttcgagccgtggcactggcgctatgtaggggtggaaaacgcccttgccatccgcgccagcggcctgagcttagaagagttcatcgccctgcagcgggcagactgaatcaaatgctctgtgctgcggcgcagagagaagggaactatcattggaacgtactctcattgcaccgggcgtgcatctttcctgcgacccggcttctaaattcaaccgctgccgcatcagcatccactttgccttcccggcagagcgtaaaacggccactgcccatgcgcttttgccgttggtgatggagcgcggctatgcggactgcccggatatgacccggctgaccaaaaagctggcaaagctctacggcgcagacctgaccgtggacgcccgccccatgggctgcaaccacaacctctgcgtcagcgtgaccggcatcaaagacgcctttgcgctggagggcgaggcgctgaccgccgagtataccaaaatcgcgctgggtgcggccttccatccgtattttgtggacggctgctttgacccgcaggccgtcagcattgaaaagcagatgctgaaaaagggccttgaggacgagatcaacgataaacgcatctactgcctgcatcaggccaaccgggaattctttggcgacagcccggcgggcgtgcggcaggagggctatctggaagaggtggacggccttaccccggccatgctgaccgccgcctaccggcagatgctgcgcaccgccaatatcgagctgctggtgctgggctgcgatgccgcccagaccgccgccatccgggacgctttgctggcagagcttgcctgcatcgaccgcgccccgctgccgctggtggaaaacatggccatgcccgccattgcaccggtgcacaagaccgaaaactacgatatggtgcaggcaaagctgtgtatgctgttcacgctggggcagcccatgcagccgcagcagctggcagccgtgcgccttgccatggcactgtacggcggcagcgtgaccagccgcctgttcctcaatgtgcgggaacgggaccatctgtgctactactgctcctcctcgttccagagctttaccggcagcatggcggtgaacagcggcgtggagcacgccgatgccgcccgcgcagagcaggcgattctgaaagagcttgccgacctgtgcaccggtcccattaccgacgaggaatttgaggattgccgccggggtttgctcagcggcatgaacggggtagaggacagccttggcggcatcgaaagctggtactacatcgaggtgctgcgcgccggtgccaacagcgctgcgcctatccagagcccggagcaggcacggaatgccctgcgtgccgtgaccaaggacgaggtgcgggatatcctgcgccgcctgaccctctcggtcagctatctgcttacaaaggaggatgctgcccatgccgcagaataaccagaccctgctggaaaagaccgtggccgaccagtggcagaccctgccctccggcctgacggtgctggtgcgccccatgccgggctattccagcacccatgtgatctatgccaccaagttcggctccatcgaccgggatttctgcctgaacgggcaaacggtgcatctgccggcgggtgtggcgcattttctggagcacaaaatgttcgaggacgaggacggcgacgcctttgccaagtacgcaaagacgggcgccaatgccaacgcctttaccagctttgaccgcacctgctacctgttcaccgccacccagcagttggacgaaagtctggatgtgctgctgggcatggtgggtcacccctactttaccgagcagaccattgcaaaagaacagggcatcatcgggcaggagatcaaaatgtacgatgacagcccggattggcggctcatcaccggcctgttcgagtgcctgtaccacagccaccccatccgcagcgacatcgcgggcacggtggaaagcattgccgagatcacgcccgccatgctgtacgacagctgcaaggcgttctatgccccgggcaatatggtgctggctgcggccggcaacaccaccatggagcagattttggctgcctgcaagcggcacggcctgatggagccccgcccggcacagaaggtgcagcggctgtgggcttcggagcccatgacccttgccgccacggaaaaaacgctgatcatgccggtttctaagccctgcttcggcgtaggctttaaggaagagccgctgcctgcggacgatctgcgcaccgaggcgctgtacgatcttgtgctcagttgcatcgtgggcggaatgtcgccgctgtaccgccgcctgtatgacgaaggtcttgtgaaccccggctttggcggcgaggtgctgcgggtggacggctgctgctgcatcctgttcaccggcgagagcgatgtgccggacaccgtgcgccagctgctgctggacgagatcgcccgggtgcgcgccgccggtgtggacagggaagtgtttaccctttgcaagaacgaaaaatacggtcagctgatcgaaaatctggaaaacgtggaggactcggccagccagatggcagactttgccctcagcggccagacggtggcacagcagatctccatgctggccgggttgaccgcagaggatgcggacgctgccttgcagcacatcctgtgcactgaccgcatggctaccatgtacatccagccggacggcacggcgcaggcggcagaagaggacgaggaggaagaaggatgaaccatcttacaaatctggtacagttcccgggtcttgggctgagctttcagctgaaccgtgtggcctttaccatcggcggggtcagcatttactggtacggcgtgtgcattgcggtgggtctgtgtctggcactgatctttgccttccggcacagcattgagtttggcgtagacccggacggcatggtggacgtcatcctcatcggcgtagtgctgggcatcatcagcgcccgcgcctactatgtggctatggcaccttttaaatatgaaagcatctgggagatgatcgccatccgcgatggcggccttgccatctacggcggcatcattggcggctttttgttcggtggtctggcctgcaagtggcggggcgtgccggtgctgcccatgtttgacctgaccgctatgggctttctcctcgggcagggctgcggccgctggggcaactttttcaatcaggaagcctttggctgcaacaccaccctgccttggggaatgtacagcgagacgacccgtgcttacctgatgagcagcacggtcacggtacccaagggtatggtcatcgaccccaacctgccggtgcatcccacctttttgtatgaaagcatctggtgctttgtgggcttcttcctgctgttccgctacatcaaaaagcgcaagttcaacggcgacatcaccctgcggtatctgatctggtacggcgcaggccgtttctggatcgagggcctgcgtactgacagcctgatgctggtgccctccatcgggctgcgggcttcccagctggtggcaggcatcgccgtggtggcaggcattgcggcagaggtgtactttacccgcaagctcaagggcaagcccctgctggtgccgctggcgctgaacgccgagaacaaggcggctcaaaagaagctggacggtcccatctcctttgcaggtaaggacacccagctgctggcttccagcccgcgcaagctgtttttggaaaagaccgagacctataatgcgcaggtgaaagccgccatagagcaggccgggcagaaaaaagcgtaaaaatctgcgaaaaaggggaaatttcctcttgcaatccggtttggtttttgctataatattctagccgcatggtgtgggcgcctgaaatggcccgctgtaagggtctgcctttacgaccagcgagtacaacgaaaaggaatgaacaaaatgtacgcaatcattgttaccggcggtaagcagtaccgcgtggagcagggcgacatcgtctacatcgaaaagctggacgttgaggccgactccgaagtgaagtttgatcaggttctcgctattggcgaggagggttctgtgaaggttggcgctcctgttgttgagggtgctaccgtttctgccaaggtcatcaagaatggcaagggcaagaagctgaacatcatcacctatcgcgcaaagaagcacagtgctcgccgtatgggccatcgtcagccctacaccaaggttgagatcactgcgatcaacggctaaggaggtaaattacaatggcacataaaaagggcgtaggcagcaccaagaacggccgcgattccgcagcacagcgtctgggcaccaagcgtgcagacggtcagttcgttctggccggcaacatcctggttcgtcagcgtggcacccacatcatgccgggtgagaacgttggcaagggcagcgatgataccctgtttgctctggtggacggcaccgtccgtttcgagcgcgtgggcaagagcggcaagaagtgcagcgttaagcagtaacttctttctgaataactgcaatcgtagagccggacccttgtggcccggctctttttgatgaaataaggctatgtgttcgggtggtgctgtctcggatgagggcactgaaacgcaaaagcctataaagctaaggaggggctgtatggcagcacagactaactttattgacatcgccacgatatggctccatgcgggcaagggcggcgatggcgcggtgagcttccaccgcgaaaaattcgtggccgcaggcggcccggacggcggtgacggcggccggggcggcgatatcatctttgtggcggacgaccatctgtccaccctgatggatttccgttataagcgtaagtatgtggctccggagggcggcaagggcggtgcaagcctgtgccacggcaaaaatgccgaaaatctggtcatcaaggtgccgctgggcaccgtgattaaggacgcagagagcggtcttgttatcgcagacctgtccgaccacaccccggtcaccattgctaagggtggtcgcggcggctacggcaacgcacactttgccacccccacccgccagatccccaagtttgcaaagcccggtatgcccggcgaggatctgcaggtgaccttggaactgaagctgatcgcagacgtgggtttgatcggcttccccaatgtgggcaagtccaccctcatctccaccatcagcgcggcaaagcccaaaatcgcaaactaccactttactacccttgtgcccatgctgggcgttgtgtcggtgggtgagggcgcaagctttgtctgcgccgacattcccggcctgatcgagggtgccagcgagggcgtcggtctgggacacgatttcctgcgccatgtggagcgctgccgcctgctgctgcacgttgtggatgtttccggcagcgagtgccgcgaccccatcgaggactttgagaagatcaacgaggagctggcaaagttcagccccgtgctggccgagcgtccgcagatcgttgtgggcaacaagtgcgaccttgccaccgaggagcagatcgagaccttccgccagtatgtggagggcaaggggctgacctttgtggcaatctctgccgccaccatgcagggcgtcaagcagctgccgggtctggtgtacaaccgtctcaaggatatcccgcaggtgccggtgttcacccccgagtacaaaaagccggagcccaagaagaacggccgcgacttcaccatccagcgcatggaagcccatgtgtggagcgtggatgccccgtggctggagtatattctggccggcagcaatgtggacgactacgagagcctgcagttcttccagcgtcagctgggcgagagcggcattctggacgcgctggtgcagaagggcgtggaagagaacgataccattctcatcggcgagtatcagttcgactatatcttctaaggataaagcatcatgaacgaatcagaaaagatcgacccgcgggaactcagcccgctggcgctggcctttgtaggggacagcgtgctggaactgctggtgcgccagcgtctggtggagcaccaccgcctttcagccggaaagctgaacgccgaaaaggtcaagtatgtctctgccaaggcgcagttccgggaagagcagctgctggagccgctgttcaccgaggacgagctggccgtgttcaagcgcggccgcaacgccagcaaggccagcgtcgccaagcacgcctccccggaggagtaccgtgcctctaccggcttcgaatgcctgctgggctggctgtacctgaacggacagctggagcgcgtgcaccagctgtttgaggtgctgtggcagcagtttgaccctgaccagaaataagaatgcgaaagcccgctgctttccgcactggaaaccagtggtggaaggcagcgggctttgcttgttggcatctgcggtccgtcagatgccgcttacgccatcagcggctgttcttcgcgttggtggaacggctgttggtggagttcttggcgctttcgtcatcggcacccttggtgtactggttggggtgcttgtgctcgttggtggcgctgttggtggtcttgctgctggtacggttagaggtctggttcttgcaattggtgctgcggttctcactgcggttttccatggtgtgaatgctcctttcggtcgttgctgtgggggcggggccgccctcacagtccatagtgtggccgcagccggcggctttatacatcccatgggaggaaaagaatatgcctacggaatattttgagcagcgggagcgtgccctgctggggcagcggtacgagcagctgtatgccgccccgcagcagacggcagagcgcggggtcaccgtgtcggcgctgcgcaccacgccggagcagtttgcgcagcgggcagatttcccgctggaaccctcgcccttctgcaaggcggcttttgtggtgcatcagccggattttaagcccgggcggcatccgtaccaccatgcgggggtgttctactcgcaggagccttcggcttcttcggcaacgccgctgctgggagtgcagccggggatgcgggtgctggacctgtgcgccgcgcccggcggcaaaagcagccagctggcggcggcactgcaggggcgcggtgtgctggtgagcaacgagtatgtggctgcgcgcgccgaaattttaaaaagcaatcttgagcgcatgggcgtttccaacgccgtggtgctcaacgagacccccgcccgcattgccgaggcgctgccggagtttttcgaccgggtgctggtggatgcgccctgttccggcgagggaatgttccgcaaggagccggtagcgctgcagcagcactgcgaagcactggtaaagcagtgcgcagagctgggcgcgcagattctggactgcgccgcagcggcactggctcccggcgggcagctggtgtactccacctgcacctttgcgccggaggaggacgaagagcaggtggcggcgtttttgcagcgccacccggagtttgcgctggcagatgtgctgggcaatgtgaactacacctttggcagcgcaggcgaagagaaccgcaccggcggcctgccgctggatgtgagcaaggtgcgccgcatctggccctgtcagggcggcgaggggcactttatggcacggctggtcaaggcaggtacgccccgcaccttgccgccggagggagaataccccccggaagaacagctctggcttgccgctgctgcacaggcgggcaaaaggagcaagggcaaggctgcaaaacctgccaaggcggcagacgcccgcagcactcgccgtgcggacagccgcgcctgccgggacgctgtgcagggcacgagccgccgcacccgggacaccggggcaggggaagccaccccggcgcagagccttgccgcatggcaggagtttgcccggcagtacttccccgcgctggcacagcgtccggctgtggtgcacggcggcggcgtgctgctgccggtggcctttccgcagacggggcttcatgtgctgcgggcaggggtgttcgtaggcagtgtgcagaagggacgctttgtgccggagcatcatctgttcacggcctttggcagcctgtgcacgaactgcgagcagctgacccttgccgactgccgctgcaccgagtacctctccggccgcgaggtggaagcccgcacggcagcggacggctggtgctgcgtgaccgtagacggctggccgctgggcggcggcaaggtgtccggcgggcgggtgaaaaaccactaccccaaggcactgcggctgctgtaaaccgcagatttacacgcatccgggcgaaaatcgggcttttcaggcttgaacgcgccggtggattgtgataaaataacagagttagattttgtgtgctgccacaagcgggcgaccacagcccgtctgcccgcaggcggagataccgataaatttaggaggctctttcccatgtctggacatagcaaatggaacaacattaagcgcaagaaggaaaagactgacggcgcccgcgccaaggtctttaccaagatcggccgcgagatcagcgttgccgtccgtgacggtggccccaacccggcttccaacagcaagctggcagacctgatcgccaaggcaaagcgcatgagcgtgcccaacgataacatccagcgtatcatcaagaaggccgagggcggcgacaagaccgagttcgaggccatcacctacgagggctacggccccggcggcgtggcagtcatggtggagaccctgaccgacaaccgcaaccgtaccgctgccgacctgcgccactacttcgataagaacggcggcaatctgggcgctatgggctgcgtggccttcctgttcaaccagaagggcgtcattgacatctctctggaggataaggacgccgacgaggccatgatggacgctctggatgccggtgccgaggactttgatgccagcgaggacgctgccgaggtcaccaccgatcccgagaactactctgccgtggtcaaggctctggaagagaagggctacgagatcctgtccgacgatctggccatggtgcccatgaccaccacccgcctgaccgaccccgatcagctgaagctgatgggcaagctgctggattctctggaggacaacgacgacgtccagaacgtctggcacagcctggagaacgaagaggacctgccggaataagcttccacaaggctctttgctcttgaaataagacgataaaaagccgctttttgtgctgtttggcacgaaaggcggcttttgtttatttctgtgccagcgccttgccttttgcgtagtagcgctgcatttcttcccgggggaccatattcccgccggtggcccagaccagatgggtggcgtttgccagcgtaccggcgggcagggcagcttcggtgtaagcgccaagcagctgcccgggctgggtgagcaccgggccatacattcccgccagagcactgggctcaaggtaaagatcttcggcatctgccagctgtgccagaagggtatacatccgctcgtcctgcagggtgtagcagccgctcatgaaggggcgcatcagcccgcccacaaagccggaagcacaccccacggcaagaccatcggcggcggtgcggttgtcgatgccaaagtcctgcacacagacgctgctgttttcgccggtagccatgcccagcatcatgcagggggagtgggtgggctcggcaaagaagcagtgtgcggcatcgccgaacagcatcttcaggccaaaggccacaccgccgggaccgccgcccacgccgcagggcagataggcgaagaggggatgctccgcgtccacggtgacgccctgcgcgtccagctgctttttcaaccgcagcgcagccacggcatagcccagaaagagggtcttggagttttcgtcatccacaaaatggcagtaggggtcgcccgccgccagtttgcgcccctcggtcacggcgatgctgtaatcggaggcgtattccaccaccttgacgccccggctgcggagcaggtcttttttccactgccgcgcgtcagcggacatatgcacagtgacctgaaaccccagctttgcgctcatgatgccgatggaaagccccagatttccggtggaacccaccgcaatggagtattgcgagaacagcttgcggaagtgctcctctgccagaacggcgtagttgtcggtcaggtgcagcattccgctgtgcagggcaatgtcctcggcggttttcagcacctcgtaaatgccgccacgggctttgatggaaccggaaataggcaggtggctgtccagcttgacccatatctgtccggcgatgggggtgccgctgcgctcttccagcaccttttgcatccgggggatgggtcggacaggggattcaatgatgccgccggtggcagcagtttcaggaaagacggcggcaaggtagggggcaaaacgctccagccgcgcggcggcgtcctcgatgtcggcaagggtcagcggacaggcagccgcagcctgtgcaaagggcagcttgtccgggtttacccatgcagtctccttcagggcgcagaggtcggagaccacgggatatgccgcgatccaatcggcagcggaacgccaggcgatgcacttgtcaggtgaaaccatagcggatcctcctttatatatagaagtttggatagaagcggatgagtgcgcccggcaggtttcgcgggcgctgaatgttttgaatataaaggtttttataggaattgtcaaccggaacagactgctttgcgccgggcgggtcagagaactacatacttggcggttacaagatattgcttgggcagcccagcggcagagcagggaatctatggaaggaaagcagcacactgcccaaaaaccttgttaaaaaactggcattttgccgtttttgtgtaaagtatacaagaataaacacaaaaaattggcattgcgcgtattgctattttacaactgatatattagaatataagcaagaagagcgtgcaggcgttctgcgcgtgccacatgataaataacgacaggaggaacttctctatgcctatgaaaatgggttggcgctggtatggcgagggcaacgaccccgtcaccctgagcgacatcaagcagatccccggcgtgaccagcatcgtctgggcactgcacaacaagatgcccggcgagatttgggaaatcgacgagatccagaaggttgcagaccagatccacgcctacggctttgatatggatgttgtcgagtccgtcaacgtgcacgacgatatcaagatcggtctgcccacccgcgaccagtatatcgagaactacaagcagtgcatccgcaacctgtccaagtttggtgtcaaggtcatctgctacaacttcatgcccatcttcgactggacccgcactgacctgttccacccggtaggcgacggttctaccgcactgttctacgagaaggacaagatcaagggcgattacaaggccatggctgagtatatcatgtccttcaccgagaagtataacatgaccttccccggctgggagccggagcgcatggcaaagctggacgagctgttcaaggcctacgcccctgtcaccaaggagaagctgtgggagaacctgaagtacttcctggaagctctgatgcccacctgccacgagtgcgacatcaagatggccatccacatggacgatcccccttgggatatctttggcctgccccgcctgctggtggacgagcccagcatcgaccgcttcctgaagatggtggacgatccgtacaactgcctgaccctgtgcaccggcagcctgaacgcaaaccccaacaataactgtgccgagatcatccgcaagcactgcgaccgtattgctttcggtcacgtccgcaacatccaccacttccccaacggcgacttctctgaggctgcgcaccgcgactgctgcggcgagactggcatcattgaggtaatgcgcgcttaccatgactgcggctttgagggctacatccgccccgaccacggccgtcagctgtgggaggaaggccccggcgtctgccgccccggctatggcaagtatgaccgtgctctgggcatccagtatatgctgggtatctgggatctgctggaccgtctggatgaagaaaagaagggctgattactatgaagctgtctgatattaaaaacggcaatctgtccgccgagtgggcagaaaagggctacgagctgcccaaattcgacattgaggctgtgaaggccaagactcacgccgagcccacttgggtgcacttcggtgccggcaacatcttccgcgctttccccgctgccgtgctgaacgatgcactgaacagcggcaagtacgaccgcggcgtcatcgtggccgagagcttcgactacgagatcatcgacaaggcttaccagccctacgataacctgagcctgctggtctgcctgaagtccaccggcgagatcgagaagaaggtcatcgcctccgttaccgagagcctgaaggctgactattccttcggcgctgattgggcacgtctggtggagatcttccagaaccccagcttgcagatgatctcctttaccatcactgagaagggctacggcgttgctcccgctgacttggagcgcggcctgacccccgttctggcgatgggcaaggtcaccgctctgctgtacgagcgcttcaaggccggcaagctgcccctgaccgtccagagcatggataactgctctcacaacggcgataaggtcaagaccgctgtccacgcctacgctgcaaagtgggtggagcagggtctggtgcccgcagagttcctggcctatgtgcaggacgagaccaagatcaccttcccgtggagcatgatcgacaagatcaccccgcgcccggacgcaaaggtgcaggagatgctggcaaaggacggctttgaggataactacaccatcgttaccgagaagcacaccttcaccgctcccttcgtcaacgccgaggagacccagtacctgtgcatcgaggatcactacaccaatggccgtcctccgctggagctgggcggtgtgctgtactgcgaccgcgagaccgtggacaagatcgagaagatgaaggtctgcacctgcctgaaccccctgcacactgccatgtctatctatggctgtatgctgggctacaccctcatctctgccgagatggcagacgaggatctgcgctcctttatccagaaggtcggctatatcgaggcgatgcccgtggtcgttgatcccggcgtgctgaacccctacgagttcatcggcgctgtcatcaaccgccgtctgcccaaccccttcatgcctgatgctccccagcgtatcgctaccgatacctcccagaagctggcgatccgcttcggcgagaccatcaaggcttacgaggagcgcggtctggacaagtccaacctcgtgctcatcccgctggtgctggcaggttatgcccgctacctgaagggcatcgacgacaacggccagcccttcgagatctctcccgatccgctgctggctgaactgcaggccatcgtcagccccttgcaggtcaaggaaggcgagcaggacttcagctgcctgaaggctctgtacagccgtgccgatgtgttcggtgtggatctgtacgccgtcggtctgggcgaaaagatcgagggcatggtcaaggagctgtacgccggtaacggcgcagtgcgcaagaccctgcacaagtacaccctcgcccgctaaaatgttataacgctatttccgtacccacgctgcgcttttgctttgccgcagcgtgggtttttgttttgtctaaaaggtttgcgaaccttccgggcttgtctttccacgggaatggaaacgtcctcgcagcgcgactgtttccgaaggaaacaagcgctgcaaatgcagtttccggttacgaccccattcctgtgaaaatgaaatcccggagcgtccgcagacgctccgggatttcgaaaaaatcataattttccgctattcatgcgcagagcaaagcggagcgcattaaaaattgtccctatgcccttatttccggcagtcgtgcaggctggcggcgggcagggcactgcccagcaggctccatgcggcatccatgctctcgttcagcagataggcctgattcttctggacgtagatgtacaccgcctctttggtgcggtaggcgcagtacacggtgttccaagtgtagcggttggtgggctcggtcttgttctgctcaccggccatccagaccgaaagcccggcggcgtccagttccagccggtagaaggggcggggcagacccagctttttgatctgcttggagaggtttgcaaaaaaggtgccgaagtatacggcgggcagaccgatggctacgatggtcagcacggcggtcagcagcccggcgccctcccgtttgccgatctggctcaggcagatcccggcgcacaccagcagaatggcagtgaacaccgccgggcgctgccagcccttgttgtggcgcagcaggtcgaaagatgcaaaatcgtgaaagcttttttcgtccatctgaacggaaacacaaacattctgggtcataaaattaccctcctttttgggcatagtaccacatttatcggcaagaagcaagcaaaagatgcaccggcggcggtgcatccggcttgcaaaccgcccgcaaggcgtggtaaaataagatattatctaacggatattatccagcgaaaaaagggggaagctttgcatggaaaagcgcaactggaagcgcagcgttacgctcaagcagcgcatggtgctgtgtctggcggctttttttgcggcctttgcgttgcagcttgccctgaacggctatcaggcacgggcggtgcagcaggtgcaggacgaccagatgggcaactttaacgccatcagccggtttcagggcggtgtggaaagttccatcagcattctggaagcgtaccgctgggagaacggcgagaccgaggaaatgctggaaaagctccgggcagcctgctccaccagcaatgcgtggctgtggcgcatccgatccaatatggatggcttgcagaacgtcagcgatgagcagtgggtgctgtacggtgcggtggagaccacctacggcagctacagcgctctgctggaggaactggagggctgcctttccagcgggcaggatgcaaaggcgtcccagctgtactataacaaggtctcggtctgcggcgggtatctgagccagtacaccatgcagctgctgaaagcctcgattctggacgcccagactacttataccgagatctcggagctgggcgagcggatcgccctgatgcagatcgtggtggtggcgctgtgcgtggcactgggctgcgcttccggtctgatggtcatgcggctgctgaccccagtctcccagatgatcgtagcttcccgtgccatcagccgcagccagttcgacaccccggacatcccgctgcctaagcagccggagatcgggcagctggcggagtctttcaaccgcatgaagcactccatggcgcagcaggtgagtaccttacaggagaaaaacgagatcgagcgggagctgcaccgccaaaagaccgaagcactggaattgcagaaccgcatggagcgcagccggttacagcagctgcgcagccagatcgacccgcattttctgttcaacaccctgaacgtcatccagcagatggcgggcacagagtccgcctaccgcacacaggcgctcattatggcgctttcccatctgctgcgttacagcctgatgagcaatgatgaacaggtgcccctctcccgggaggtgcgcattgtggacgaatactactccatctaccatgtgcgatttggcgaccgggtgcagatgcagtgggcgttctcggactcgctggacctgaccgagactatggtgccgtcctttatcttgcagcccatcgtggaaaacgccttcaagcacggcatctgccccaaggaagagggcggcgtggtgcgcatccgcatgatccccctgcgggaaaaaggtctgctgtgcatccgggtgctggacaacggcgtaggcattgagccggagcagctgcagcagctgcgcacggcactggaacagcccgcgccccgctgggaacatatcggtatttataatgtggctgcccgcttgcggctgctggatgcccgctgccgggtggtggtgcgctcccggctggggcgggggactgcggtgatcctgtatctgccgctggtggagaatgaggaggaatttgaggaatgattcgtctgttgatcgcggatgatgagaagatggaacgggaagcgctggcggatatcgtcatgcgccggttcgagcatgaggtaacagtggaaatggcggaaaacggacgcaaagccgccgataccgccgtgctctggggtgcagacctgattttgatggacatcgagatgccgggcatgaacggcttggatgccgcccgcgcggtgctggagcagcgcccggagtgcaaggtgatctttatcacggcatacagcctgttccagtacgcccacgaagcggtgcatctgggtgcctgcgactatctgctgaagccggtggacccggacgagaccgaagctgccatccgccgcgccatccggcagatcgaagccggacgccgtctggcagagctggctgcggaagccccggagcaggaaaccgccccggagcaggagaccgaccccgccggggaaggggagagtgaccgcaacgcactggtgatggatcatgtgcgcaagtatatggaagacaactatatgtccgacctctcgctggacagtgtgagcgagatcttgcacatcagcccggcgtatctttcggcgcagttcaaaaagtaccagaagatgaactttctggactgcctgaccgagctgcgcatcaacgcagccaaagagctgctggccgaccccttccgctccgcagcagaggtggcctccatggtgggctacgaggatgccagttactttgcccgtgcctttaaaaagcgcaccggcatgacccccacccagtaccggaaggaagcggcaaaggcggcccgggaggcacggctgtgacccgccgtcagctgctgcgtctgcttgcggcagccccggcactggcagtcacaggctgcacagcacagtctgcttcttcgcagcaggaaaagccgctcattctgcgctatgcagagaatcagccggaggactaccccaccagcaaggcggcaaaggcctttgccgagcttgtggcgcagcacacggatggccgggtaaaggtgctggtttacagtggggcagagctgggcgcggagcagagcgtcatccagcagatgcagttcggcggggtggatttttcccgcgtgtccctgagccagctggcagagtacgagccggagctcagcgtgttgcagctgccttacctgtacagtgatgccgagcagatgtggcgtgtgctggacggcagcatcggcgacgagtttctggccatgctggacgggatggacttagtgggactttcgtggttcgacgccggtgtgcgcagcttctatacccgggaaaaggtgaccgggctggatgatttgcaggggctgaccatccgggtgcaggagtcggacatgatgagcgacatgatcaccgcactgggggcaaagccggcgcaggtggtgtacagcaaggtatatgccgccctgcataatgccgagatcgacggcgcagagaacaactggcccagctacgaggtgatgggacactacgaggtagcgccctttttcctgaaggacgagcacacccgcgtaccggaggtgcagctggccagcccggcggtgatggaaaagcttgccgcgctggacgaaagcttcccggaggtgatccgcgcctgcgcccgggagagcgcacagaaggaacgcgagctctgggcacggcgggaagcggacgcggagcagaatatgcgcaagctgggcatctgcgttaccgagctggacgaagccgagaaagcccgcttccgcgcagcggtgcagcccatgtacgatgaattctctgcccagcaggaactgatcgaccggatacaaaaaagctgaagaaaacgccccgagaagtgcccggacggacatttgtcggggtgttatttttgcattatgaatacaggaatgtatccaactggtcagcagtgttgcacaaacgaaatgaaaaacgcttgtgcaatatggcaaaaacaatcttgacattctttcgaaaaacaggacattttttgaaagcccttgtttcatttcggaaaatttgctaaagtgtgtacagtcaatgaacgaaagctccggcacctgtgcgcccggagaatttcacaattatttaaggaggacgattcctatgaaaatgatctctcgtcgtagctttatggctgttgccggtgcagctactgctgctgttgctctgaccgcctgcggtggttccaagagcaattccacctctaccgctgcttccacctctaccgcagcttctgcttctgctgctgccggtgatgcagcagctgctgccagcgatcccaaggtgactctggtctacgccgaggtcaacccgctggataccatcgttggtcagaccggttctcacttcaaggagaaggtcgaggagctgagcggcggttctgtggtcgttgatgtgcaggcttccggtgttctgggctctgagaacgacgttctggacgctattctgggcggctctacctccattgatatcagccgtatctctgctttcgctctgaccagctacggctgcaacaagtctaagctcctgtccatccccttcaccttcaacaaccgtgctcacttctggaactttgccaacagcgatctggctcctgagttcctgaacgagccccaggagctgggtctgcccgttcgcggcctgttctacggcgaggagggcttccgtcacttcttcaccgtcaagcccgttgccgctatcggcgacctgaagggcatgaagctgcgtgtgtccaacgaccccgttatgaacggcatggtcgagggtctgggcgctaaccccaccgtcgttgccttcggcgagctgtacagcgcactgcagaccggcgttgtggatggcgctgagcagcccatcgcaaactacaagtccaacgccttccccgaagtcgctaacaacctgatcctggacggccacactctgggcgctgtgcaggctgtcatcaccgacaacgcatggggcaagctgaccgctaaccagcaggctgctgttatggctgctgctgccgacacccagaagttcaacgctgatctgtctgagaccgctgagaacaaggttctggaagagctgcgctcctccggctgcaacgttgtggacgtggacgacaagactccttggcaggaagcttgcgctaaggtcatcaaggacaacacctctgatcaggctgagctgtaccagaagctgctggacatgaaggcataatctggctttccatccaatctaagtagtacattgcccggcgggggcccacgggaatacgcccgcaggcttcgccgggtttttatatggaggaatttctatgccgaaaatctttaccactctggataagatcaaaccggcgtacgacattacctacaaggtggttctgttcatctgcaagatcctgctgattgcagatatcctcattaccacgatgtcggtcattggccgttacgtcccctttatcccggacccctcctggtctgaggaggtcgttctgacctgcatgagttacatggctgtgctcagcgctgcgttggctatccgccgcggcgcacacatccgcatgactgcctttgatatgtacctgcccaagaaagtggtcaaggcgctggacattctgtccgacgtggctgtgatggttcttggtgtggtgatgatggcggtcggctggaactacgccaccacactgggcggtcgtggcttctatgtttccatgccttggctgagccgcttctggatgtacttcccggtgccgctggccggtgttgccatgatcatctttgaaatcgagtctctgtataaccatatcaagagcttttttgtaaaggaggaaatgtaatatgacagttcagacactggcaatcattgtccttcttgtcagcttctttgttatgatcttcctgcgcttccccattgcatacgccgttggtctgtccagcgtgctgtgcatgctggtgcagggacaggcactgaccgacgtctgccgcctgatggtcaagggtatctcttccttcagtctgatggctgtgccgttcttcatcaccatgggcgtgctcatgggctccggcggcatttctgaaaagctgatcgcactggctgacgcctgcgtgggctggatgcgcggcggcatggccatggtcaacatcgtggcttcctacttcttcggcggcatttccggttccgcttccgccgataccgcctccatcggctctatcatgatccccatgatggtggatcagggctacggtgcagacttctccaccgctgttaccatcacctcctcctgcgagggtctgctggttcctcccagccataacatggtcatctacgctaccaccgccggtggtatctccgtgggcagcctgttcctggccggctacctgcccggcgctctgctggctatcgtgctgatgatcggctcctacatcatctcggtcaagcgcaactaccccaagggcgatgcattcagcatcaagcgctttatcaagcagctgggtacctccatctgggcactggccgctgttatcatcgtggtgttcggcgttgtcggcggcgtgttcaccgctaccgagtccgctgctatcgccgttatctactctctgctcgtttccgtgttcgtctataagggtctggactggaagggcgtgtggcacgctctggacgagtgcgtcaacaccctgtccatcgtgctgatcctgatcgctacctctgcagtgttcggcaactgcctgaccatgctgcacgtgcccgatctggcagcaaccgccatcaccgacctcaccgataacccctacctgattgcactgctcatcgacctgatcctgctggtgctgggcatgatcatggatatggctcccatcatcctgatcgctacccccatcctgctgcccatcgccacctccatcggcatcgatcccatccagtttggtatcatcgtggttctgaactgcggcatcggtctgctgactcctcccgtcggctccgttctgttcatcggctctgccgttgcaaagcgccccatggagaaagtggtcaaggcgaccctgccgttctacctgtgtatgttcgttgcactgctgctgctgacctacgtccccgacatcagccttgctattcccaagctgctgggcggctacgtcagtcccattgcaaacccgctgggtcctgtgtttatccactaagcgcagcataagagaaaacccttgcatctataagaccggagcctgtcagccctttgggctgcgggccccggtcttttttgcgtgtgcaccaaaatgcggacagcttgcacggcggggaacactatgataaaataaaaagcatagatgcttggaaggggagagaacactatggagcaaaaacgcctgtgtccgttctgcattggggaactgccgcctgcggcgaccgtctgcccccattgcgggaagatcttagagggctgcaacccggcgggctgcctgccggtgggcacggtgctggccgggcgctacactgtgggcgagatgcgcagtctggacggcgagggtgtgatgtacagcggcgtggagaatctgggcgctttccgggtgaccatcaaggagtacctgcccgtcaccctttctgcggagcggggtgcggactgcatcctgcgccccaagcagggcagcgaagtgctgttcaagaccacccgcatggactttgcagacctgtaccgcgccatccagcgcattacccccgccagcggtctggaagccgtgctggacgtggtggaagccaacaacaccgtgtatgcagtgctggaaaacctaggcggcaccccgctggagcaatggctggaaaaccgtcctgccccggtgcgagcagaggaggcctgcgccatgctgcgcccggtgtttgagggtgtggcggccatgcacaaggcagggctggtgcaccgcggcatctgcccggagaatatccgggtaatggcagatggccgctgccgtctggccgggtatgccaccgtgggtctgcgcaccgcaggcagcggcctgcacgagcagctgtacgaaggctactctgcgccggagcagtacaccaccgccgagtttgaggggcgctacaccgacgaatacagccttgccgccgtcttttaccgcatggtgtgcgggcaggcacccatgcccgctgcccagcgcgtggtgtcggactctaacccccgggcacgcaccgtagagcctgccgtaccggcctatgtctccgatgtattgcagctggggctgcggctcaaggtcatggagcgcatccagaccgtgccgcagctgtatcaggcgctttcttccaaggaatataccgccgagctgacccgcaccatgaagccggagaccccgatgcatccggcgcgggcagagcagagcccacagggcagggaacatctgctcagtttgaaagggctgctggcgggcatcctgatcctgctttccgttctgatcttgctcaccctgtggggcatcgtgagcagcaaggaggagcagacccccgtctcggtgccgagttcggaagctgccagcagcgaggaaatgaagccacagaaccttgtgcccaactttgtgggcatcgactacgagcagatcaagaataaccgcgagtacaccagtatgtacctgttccgggcggtgctggagtacagcgataccgtgccctccgggcaggtcatccggcaggagccggaggctggcgaggtgatggagaacggcgaggtgatccagatcgtggtcagtcagggcccggaaaaggtggagatgccaaagatcatcggtgcatcgcaggataaggccattgagatcctgagcagccgggggcttgtggccagctgctttatggtggtgaacgatggctcctatgccacgggctgcgtagtctctgccagtgaggaagagggcgctatggtcacggtgggtacggtgatcaccatatatatcgccgcagaccccagtgtgcagatcaccgccaccccggaagagcctgccgctaccgagcctaccaccccggaaacgcccccggagggcagcacagagccggaatacgatacagattaaaaaataaaagcagaagcgggagccttgcaacgggctcccgcttctgcttgtttaggataggaaagagaatggcaaattaaagattggtatagcccatcaggcagcggtctacttcggcggcgcaatcgcggccttcgcgcagaccccacaccacaaggctctgaccgcggcgcatatcgccgcagacgaacaccttgtccacattggtcttaaagctgtggtcggctacattcccccgggcggtcagctccaccccaaaggcatcggctgtatagttttcgcagccggtaaagcctgcggcaataaatgccaactggcagtcgtaggtaaattccttgccggtgggcaccatgctggtgcgtccggtctcggggtcgtgttccggtttcaggcagctgatgacggcaccggtcaggttgccggcttcatccttcagaaactctttgacggtggtctggtatacgcgcgggtccttgccgaactttgcaatgcactcggtctggccgtagtccaccttcagcacccggggccactccggccacgggtttgcagcggtgcgctcgacaggaggctgcggcatcatttccagcgccatcaggtcggtgcagccctgccgcagggcagtgccctgacagtcgttgccggtgtcgccgccgccaatgaccagcacgtttttaccggctgcgttgatggccctgccgtctgcaaaacccgagtccagcaggctcttggtcacgctggtcaggtagtccacggcaaagtgcacgcccttggcgtcccgaccgggcacgttcaggtcgcggggcttttttgcgccgcagcacagcactacggcatcaaaatctgccagcagctgctcggcgggcacggcaccgcccacatccatgccggtgcggaacacaacaccctcggcctgcatcagcttgacccggcgctcgatgaccgccttgtccagcttcatgttggggatgccgtacatcagcaggccgcccacacggtcggcgcgctcaaacaccgtaacggcgtggccgcgcttgttcaggtactcggccaccgaaagccccgcagggccgctgcccaccacggcaacgctcttgccggtgcgggtcggcggcggggtagcggtaagccagtttttggcataagccgtctcgatgatggcgtgctcgttttcgcgcacggtgacactgctgccggtcacatccccgcaggtgcaggcggcctcgcacagggcggggcacacccggctggtaaactccgggaagcggttggtggccatcaggcggtggagcgcaagctcccacttgccgtggtacaccagatcgttccactccgggatgaggttgttcagcggacagccggaggccatgccgccgatcatcatgcccgcctgacagaagggcacgccgcagtccatgcagcgggcggcctgcgtctgctgctgctcccgcgagagccagatgtggaactcgttaaaattttcaaggcgctccagcggcgcaacgtccgtgctggtcttgcgcgcataatccataaatcctgttgtcttacccatgctgctgcccctccttacttatgcttctgcactgcatagaatgcttcgatctgtgcctgctcgccgtccagaccacgctcctctaccgaggcgatgacccgcagcatccggtcgtaatcgtaaggcagcacctttttgaatttgggcaggaacgcgctgaaattgtccagaatctctttgccgcgcggagagccggtggcctccacatgggcgcggatcagctccttcagggtggcaacatcgtacttgtgctccaccggctcaaggctgacggtttccttgttcacccgctggtagaagtcccagttttcgtccagcacataggcaatgccgccggtcataccggctgcaaagttcttgccggtctgtcccagcaccaccacggtgccgccggtcatgtactcacagccgtggtcacccacgccctcgacaacggcggtagcgccgctgttgcgcacgcagaagcgctcgcctgccacgccggagatgaacgccttgccgctggtagcgccgtacagcgccacgttgccggtgatgatgttctcctcgggcttgaagtcgatgccctgcggcggacgcacaacgatcttgccgccggaaagacccttgcccatgtagtcgttgcagtcgcccaccagctccagcgtcaggccgctcgggataaaggcaccaaagctctggccgcctgcaccggtgcagtgcacggtgtacacatcatccggcaggtcgttgccgtatttgcgggtgatctcgctgccaaagatggcaccaaaggcgcggtccacgttggaaacattcaggctgacattctggggagccttgctgcccagcttgaacttcttcatcaacaccttcatgtccagcgtgttttccagatggaagtcgtagctgtcctccttgataaagtggacgttgctgtttgcaatggcggggttgtgcaggatgcagtccagatccagctccgcggcgcggctgcccggggcggcgggcttgacccgcagcaggtcggtgcggcccaccagctcgtccacggtgcgcacgcccagctttgccatgtactcccgcagctcctcggccacaaaggtgaggtagttgatgatgtactccggcttgcccttgaagttcttgcgcagctcggggttctgggtgcagatgcccatggggcaggtgtccagattgcacacacgcatcattacgcagccctctgccatcagcagggtggtgccaaagccgaactcctctgcgcccagcatacagctgatggccacatcccggccggacagcagcttggagtcgctctcaatgcgcacgcgggtgcgcaggccgttcaggattagggtctggtgggtctcggcgatgcccagctcccagggcagaccggcgtgcttgatggaggtgcggggtgcagcaccggtgccgccgtcatagccggacaccagaatgacctgtgcgccgcccttggcaacaccggcggcaatggtgcctacacccgcctcgctgaccagcttgacgttgatgttggcgctgcggttggcgtttttcaggtcgtaaatcagctctgccagatcctcgatggagtagatatcgtgatggggcgggggagagatcagacccacgccggtggtgctgtggcgggtcttggcgatccacggatataccttggcaccgggcaggttgccgccctcaccgggctttgcgccctgtgccagcttgatctggatctcctcggcgctgaccagatacttgctggtcacgccaaaacgggcagaggccacctgtttgattttggaattgctctcgctgtggtaacgctcctcgggctcgccgccctcgccggtattgctgcggccgcccagacggttcagggcgatggcaatggtctcgtgtgcttcgctgctcagtgcgccgtagctcatggcagcgcccttgaaccgcttgacgatgctggagaccggctctacctcctccagcgggatgccgccgtctgcggcatagttgaagtccagcaggctgcgcagatgcacgccctcggcacccatgttgtccaccgtctgggtgaactgcttgaaggtgtcgtaatcgccggtgcggcaggctttctggaacagatggatggtctgggggttgaacaggtgctcttccttgccgctgcggaacttgtgggcaccgctgtcggccagctccatgttgatatccagtcccagcgggtcaaaggcggcgttgtgctgcgcttccacatcggcctgaatgtctgccatgctgatgccgcccacgcggctcaccgtgccggtgaagtatttgtcgatgacctctttcgagatgcccacagcctcaaagatctggctgctctggtagctctggatggtggaaatgcccatcttggaggcgatcttcacgatgccgttgaggatggcgttgtcgtagtcctgcacggcggcgtaatagtccttgtccagcagaccttcgtcgatcagctgcccgatggtctcgtgtgccagataggggttgatggcgcaggcaccgtagcccagcagggtggcaaagtggtgcacctcccggggctcggcgctctccaaaatcagcgccagtgcggtgctctttttggtgcggatgaggtactgggacactgccgacaccgccagcaggctggggatggtcacatggtattcgtccacgtcacggtcggacaggatgatgatgtttgcaccctccttgtaggcgcggtcgacctccagaaatacccggtcgatggccttttccagactggtgttcttgtagtagttgatggacaccgtagccaccttgaagcccggcacgttcatgtacttgatcttcaacaggtcggtgttggtcaggatggggttgtgcaccttgagcaccttgcagttctcgggcttatcctccagcaggttgccgtgggcaccgatgtaaacgctggtggaagtgaccaccttttcccggatggcgtcaataggggggttcgtcacctgtgcaaaccgctgcttaaagtagttgaacagcgggggatgctggctgctgagcacggcaagcggagtgtcggtacccatggcaccggaaggctctgcgcccgcccgcgccatggcaaggatcatggtgttcacgtcctcgtatttgtagccgaataccttctgcagccgggtcagctgctcgccggtgtagccctccaccttcacgttggggatcttcagcccgctcagctgcaccagattgcggtcgatccactcgccgtagggctcgcggctggcataaagttccttcagcttctcgtcatccaccacttcgcccttgacggtatccaccagcagcatcttgccggggcgcaggcgctccttgaccagaatgttctccgggtcgcattccagcacgcccacctcagaggacaggatcatgcggccgtccttggtgatgtagtagcggctgggacgcagaccgttgcggtccagcactgcgcccatcacatcgccgtccgagaacaggatggcggcggggccgtcccacggctccagcatggtggcgtagtactggtagaaatcccgctttttctggctgatgtttttgttgttctcccacggctcggggatggtgatcatcacagccagcggcagatccatgccgttcattaccatgaactccagtgcgttatccagcatggcggagtccgagccggaggtgttgatgatgggcaggatcttgttcatgtcgtcctgcagaatggggctggagatgctctcctcacgcgccagcatggcatcggtgttgcccttgatggtattgatctcgccgttgtgcaggatgaagcggttggggtgtgcacgcatccagctggggttggtgttggtagaaaagcggctgtgcaccataccgatggcggattcataatccgggtcctgcaggtcggcatagaagcggcgcaggtcgtgcacaaggaacatacccttatacacgatggtgcggctggacaggctgggcacataagtgccgttgctggcctgctcgaacacgcggcgcacgatgtacaagcggcggtcaaactcgatgcccttgcttaccttggcgggctttttgatgaagcactgccagatggcgggcatacagtcccgcgccttctgccccacggcatcggggtcaacgggtacttcgcgccatgccagaaactccagcccctccttgcgggtgaccacctcgaacagcttcatggcctgtgcccgcaggtgctcgttctgggggaagaagaacatacccacgccgtactcccgctcgttgcccagccggatgttcagctcctcggccaccttggagaagaacttgtggctgatctgcagcaggatgcccacgccgtcgccggtcttaccctcggcgtccttaccggcgcggtgctccagccgctccacgatggacagtgcatcgtccaccgtctggtggcttttacgtcccttgatgtccaccacagcgccgataccgcaggcatcgtgctcgaactgtgggtcgtacagaccaagggtggttttctgctctgtaaagttttccatagtctttcccatcctttttacgtgtttgcttaccgggggctgcggcaccctccgcagctttttatcccctgcaaaaagaaaaaagcgccccgcaagggcataggatgcccctgcggaacgcctttgttccgatacctgatattatacagattcctgaaaaatcttcaagtgacagctgcaccaaatatgctacacacattgcgccgcttcttgtgcgaaacgccgcgagcccccgcagctgtgcgcggcatacaaacaaaacctcacccgcccagaatggcctgcaggtcggcttccggggtggcaatgggcttgaggccgtaccgttcctgcagggtgcgcaccacccccggcgagaggaacgggggcagggtaggccccagccggatgttccggatgcctagcgccagcagcgcgatgaggatgcacacggccttctgctcaaaccagcacagcaccagcgagaggggcaggtcgttgacgccgcagccaaaggcgtcggccagcgccaatgcgatgcggatggcgctgtaggcgtcattgcactggcccacgtccaggatgcgggccaggccggtgcccggcacggtgccaaggggcaggtcgttcaggcggaacttgccgcaggctagggtcagcaggatggtgtcgggcggggtaaggcgggcaaactcggtgtagtagcggcggctgggccgggtgccgtcgcagccgcccaccagaaagaagtgccgcagcttaccgttccgcaccgcctgcacgatctcgtccgcgtgctgcagcacggcggtgcgggcaaaaccggtggtcaccgtggagccgccgttcaggccgggcagcagggtgtcctgcgcgtagccgcccagctccagcgccttttcgatcaccggggaaaagtcgcgcccttcgtcgatgtggggcacgccggggtaagccaccaccgaggtggtgaacacccggtcggcgtagctggcgcgcaggggcatgatgcagttggtggtgaacaggatgggcgcggggatgtcctcgaactcccgctgctggttctgccatgcggtgccaaagttgcccttgaggtgggggtagcggcgcttcagctccgggtagccgtgggcgggcagcatctccgagtgggtgtagacgttgatgccccggcctgcagtctgttccagcagctgctgtgcgtcgtagaggtcgtggccggaaatcacgatgaacggccccttttcaatggtcaggggcacctgcaccggttccggatcgccaaacgcgccggtgttggccgcgtccagcagctccatgcagcggtagctggcttctcctgtggcctgcaccagctgccacagggcgtcggtggtctggccggggtcgcccacggcctgcagggcggtacagaagaaccggtccagctccgggtcgatgcggcccagcacccgggcgtggtagttgtaggcggccatgccccgcaggctgaacagcacaaagcatttcaggctgcgccggtcggcatccggttcccgccagagggcctgcatgtcgtagtccgggccggtgccggggctggcgtcgtgcacccggcgggtcagcgcgtccacggcggcggggtcaaagttcacgttggtaatggtggtgaacagcccctgcatcagcagccgggcctgttccggggccgggccgcgccccgccgcgatgagctgcccggcaaacgcgatgagcgccccggtgagccggtcctgtgcggcggctgtctcggccgacttgccgcacacccccgctgcgccggtgcaggcggtgcagcccgccgcctgctcacactgaaaacaaaacatctgctcgtccatacaaaactccctttctgccataagatactgccagtgtgggcagagcggggcggggttataccaaaaaagagccgcacccctgcgggcgcggctcttggacgatgcagtatgacttagtaggtgatgccctgtgccatcatggcggtagcaaccttcaggaagccggcgcagtttgcaccgaccatcaggttgccctcagaaccggcagccacagaagcgtcgtaggaagcgtggaagatgccctccatgatgcccttcagcttggcatccacttcctcaaagctccagctcaggcgctcggagttctggctcatctccagaccggaggtagccacgccgcctgcgttggaagcctttgcgggtccgtacagaatgccgttggacaggtagacctcgatggcctccggggtgctgggcatattagcgccctcgcagaccacggtgcagccgccctttaccagagcctcggcagactccttgttgatctcgttctgggtagcgcagggcagggcgatgtcgcaggggacagtccaaacctgggtgcaatcagccacataggtagcaccggcgtgggtctcggcgtactccttgatgcggccacggcgcacttccttcaggtccttcacataggccaggtcgatgccgttggggtcgtagacgtagccgttggagtcggacatggtaaccaccttggcgcccatctgggtcgccttttcgcaggcgtagatggccacgttgccggagccggagatgaccacggtcttgccctcgaagctgtcgttgcgcatacacttcagcgcctcggcggtgaagtagcacaggccgtagccggtagcctcggtacgagccagagaaccgccgaaggtcaggcccttgccggtgagcataccgccctggaagctgttggtcaggcgcttgtactggccgaacatatagccgacctcgcggccgccgacaccgatatcaccggcagggcagtccacgaactggccgatgtggcgatacagctcggtcatgaagctctggcagaagcgcatcacttccatgtcgctcttgccgtgggggtcaaagtcagagccacccttgccgccgcccatgggcagggtggtcaggctgttcttgaaggtctgctcgaagcccaggaacttcaggatgccctgattgacagagggatggaagcgcagaccgcccttgtaggggccgatggcgctgttgaactgcacgcggtagccgcggttcacctgcaccttaccggcatcgtccacccagggcacacggaaggtgatgatgcgctccggctccaccaagcgctcgatcagaccggccttctcgtactcggggtgcttttccacaacgggctggatgctctccagcacctcgcgcacagcctgcaggaactcgggctcgttggcgttgcgcttttccagaccctcgtaaacgcgcttcaggtattcattcgtcagcataatagaatactccttttcccaattactctataaatttgaaaaagcggaaatgcctttgcccgccgcacagcggggatatccttgcagatgccgggcgcttccggttctccatgcttgcatggcacgcccgcataagcgggcaatgcttactttactattataaagctttgcggtgggttttacaatagcaaaaagcagaatttgtttaaaaaaacagataaaaagtaacagctgcttcacaaaacgaaaattaaaagcaggaatgggccgcgaaccttgttttttaaagtgcgctgccactccaaagccgtgcggaaaagaatgtcttttgcaccgcggcaggcatatctaagcaaaaagccctgtgtcgcaacgggcacagggcaggatgcattacttcttcagcagcttttcgcaggcgtctgctgcgccttccaagaattcgccgccgtaagtctcgatcatgccggcgtcggaaagctcggccagtttggggtcgatggggcacttggccagcacaggcaggttgtgctttgcggcaacctcgtccacatgactgttgccaaacacattgatgtgcttgccgcagtccgggcagacgatgtagctcatgttctccacgatgcccagcatgggcaccttcatcatctcagccatgttcacggcctttgccacgatcatgcttaccagctcctgcgggcttgccaccacaacgatgccgtccaccggcaggctctggaacacggtcaggggcacatcaccggtgcccgggggcatatccacgaacaggaaatccacgtccttccagaccacatcggtccagaactgcttgacggcaccggcgatgaccgggccgcgccacacaacggggtcttcctcgttctccaccagcaggttgatgctcatcacatcaatgcccatacggctctggataggccagcagcccttgtcgtccgccatggcacggccatgaatgccgaacagcttggggatggacgggccggtgatatcggcatccagaatgccgcagtggtagccgcggcgggccatggcacaggccagcagggcgctggtcatgctcttgcctacgccgcccttgccggaaacaacgccgatgacctttttcacactgctgttagggttgggggcatcgtgctgcggagcggcatcgcgggaagaacaggctgcactgcaattagagcagtcatgggtacattcttcgctcattctctttgtcgcgcacggcaggggcaggacccgggcggtgcgcttcctccttgctcaaaatacaggcgcgggcttgcgccctgcctgaccactgttaactataccataaaaagtgcgcagaaacaacccatagcgccgctcatgttttgcaaagctgccgcataggctgaaccgtgaacgcccgttccggggcagggggaggtgcagggtgcggcagaactactttaaaaatgcggcgctgcttaccggttcggacgtggtgctgcggctggcaggcatggggttgcgcatctggctggctaacgccttgggcggggcgggtatggggctgtaccagctggtgctggcagtgtacgggctgttcgtcacgctggccacggcgggcatctcggtggcggctacccggctgctgaccgaggagctcagccgggataaggccgctgcgcgcgggatgctggtgcggctggtgttggcagggcttacgctgggcgggcttgccatggtcgcccagcttgccaccgcaggccttgcggcaaaatggtggctgggggatgtccgcgccgctgccgcgctgcgcacctcggcgctggggctgccgtggatggcgatctctgcggtgctgcgcggcttttttctggcacggcggcgggtggagccgaacgtgctcagccagctggcagagcagacggtgcgtattgccgccgtggtgtgggcgctttcccgcacgcagggctggccggacggcagccgctgcgcgctggtgctggcggctaccgccctgagcgaggccgtatccaccgccctgatggcattgttttaccggcgggaggcggcacgctgcttcggcagcacagcaccgcgcccgccaagggaggtgtcccggcggctgtgggacatcctttggccggtggagggcggcagggcgctttccagcgcgctgcacaccgccgagaatatgctggtgcccgcctgtcttgcggtatatctggcggcttccggcgggcgcaccgccgcgctggagcagtacggtaccttaaagggtatggcactgccgctgctcaatttcccctttgggctgctgggcagtctggcggttttgctgatgccggagatcacacaggcgcatatcgagggacagaccgcccggctgaacgccctgctggaccggatgctgcggctcacggggtatttctccgcgctggcgggtacgctgttctgggtgtggggcaggccgctggcgcagctgctctaccatagcccggaggccgggttctatctggagatccttgccccggctatgccgctgatgtacttggagagcatggtggacggtgccatgaagggcatcggggagcagaaagccgccttccgatacagcgtgtgggacgccgtgctgcgcattggcggggtggcggtgctgctgccccggtacggaatgcggggctttctggcagtcatcctgctttccagtttttacacctgcacggccaacaccgggcggctgctgctttccagcggtacagggcacgctttccggcgctggctgggtgcgccgctgctggctgctgccgccgccggggcggcagggcggggcgtgcgccgtgcgctggcgggctttccggcacaggaattggcggggcagctggcagtgctgacggcgggcggcacggtgacggccatcgtgtttttactggcggcgctgccactggggctttgggaggaagtgcgggcgctgctgcggcaggcaaagaccgggaaaaacaggggaaagtgataaaaacgtaaattttctggacacaggcggggattgtgagtataatacaaacgtgtagttgtatccttccggcactgccggggaacactgccgaaaaagcagcgctgggcaaaagcctttggcgctgagaggaaaaaagaggatcgtaagtgaaagataaaaccaagaataccccgcaggtgctgctgcgccgtgcgctgctggtgctgatggatgctgccattgtggcattcagcttttattttgccctgctgctgcgggcagacggtgcggtagatgccgtgtggtggccgcacaaccgcgctctgctgtacgaaaatctgccgtggatcgtggcggtgtatatcgtctgctttctggcgggcgggctgtactcggtgctgtggaagtacgccggtgagcgggatctgatccgccttgccgggatgatcgtcgtgcccaccgctgtggtgtatgtggtgaaccgccactttatccacggtgtgctgttcaattccgccaactgcatggcatccgtgctcatctttttgttcatcggcggcagccgtctggcatggcggctgtttttgaaccacccgctgggcgagcagctgcgcagagtgcctgcgaaagaccccaaccgtccggtgatgatcgtgggtgcgggcgaagccggtgcatgggccatcaacgtgtgcaaatccaacaaggaatacggccacgccgtggtggcggtggacgatgaccccgcaaagctgaaccagaccatccacggcgtgccggtgaagggcacgctggaggatatcccggagctgtgcacgcgctacggcatccacagcatcatcattgccatccccaccttaaagggcagccgcctgagccacgttatcgacctgtgcgtcagcacccactgcgcggtacaggtgctcagcgacccgcagctggtgggcagcggtgcgccccagcaggaggtgttccgcgagctgaaccccgccgacttcctctcccgcgaggaggtcacgctggataccgacaaaatttccggctaccttaccggcaaaacggtgctggtaacgggcggcggcggctctatcggcagcgagctgtgccgtcaggtcatgcgctttaagcccggcaagctgctcatctttgatatctacgaaaactgcgcctacgagctgctgatggaattgcagcagaagtacggccgcgatatcccggtcacggtgcttatcggctctatccgggataaaaagcgtctggacgaggtatttgatacctaccaccccacggtggtgttccatgctgcggcgcacaagcacgttccgctgatggaggtaagccctgccgaagccgtaaagaacaacgtgctgggcaccaaaaacctgctggtcagtgccagcgagcacggggtagagcgctttgtgcagctttccaccgataaggctgtgaaccccaccagcgtcatgggctgcaccaagcgcatctgcgaaatgctcatccagacatttgcgggcaacacggacatgaagtgtgtggcggtgcggttcggcaacgttctgggcagccacggcagcgttatcccgctgtttgaagcccagatcaaaaagggcgggccggtcaccctgaccgaccccaacatcgtgcgctactttatgaccatcccggaggcagcccagctggtgctgcaggcgggcgcattggccgagagcggcaacatctatgtgctggatatgggcgagccggtgtgcattatggaccttgccaagcagctcatccgcttttacggctacgagccgggcgtgaatatggagataaaaatcgtgggtctgcgccccggcgagaagctttacgaggaactgatgatggacgaggagcaggacaagatgcgccgcacccagcacaacaagatctttgtggcaagcccccgcaccattgatcttgccgagttctacgggcagctgcaggcgctggaagccgctgccgcccacaacgatgagggcgtggtgcgccagctggcagccatgatccccacctttacccccacccgggagaacctgaaactgtaacagcttgaactgcggcactgggccgcatgggatagaccgcaggccggaaaatgccgggctgcgcaaaacgagagggatgttattatggaaaagaaaccgtttctgaccgaggcgatggcacagcagatcatcgaggatgtgcccacgccgttccacgtctacgacgaaaagggcatccgggagaatgtccgccgcatcaacaaggccttcagctggaacaagggcttcaaggagtactttgcggtcaaggcattgcccaaccccgttatcctgcagatcctcaaggaggagggctgcggcgtggactgctcctccctgaccgagctgatgctcagcgaggtctgcggctttaccggccacgacatcatgttctcctccaaccagacccctgtggaggatatgcagaaggcttacgagttgggtgcctacatcaatctggatgacgccaccatggtggagtttctggagcgggtggctggtgtgccgcaggagatcttctgccgctataaccccggcgggaccttccagctgggcgagagcgaagagggctttcaggtcatggacaagcccggcgatgccaagtacggcatgaccgagcagcagatgatcgacagctacaaaaagctgatgcagaagggcgcaaagcagttcggcatccacgcgttccttgcctccaacaccatctcggatgcctactacccggagctggcagcaatcctgttccggctggctgtccgggtgcagcaggctaccggtgcgcatatcagctatatcaacctgtccggcggcgtgggcatcccttaccgcccggagcagaccgagaacgacatcatggccatcggcgagggtgtgcgccaaaagtttgaagagatccttgtgcctgccggcatgggggatgtagccatcttcagcgagatgggccgctttactaccggcccctacggcgcgctggtgtccaccgtcatccacgaaaagcacatctataaggagtacatcggtctggacgcctgcgccgcaaacctgatgcgccccgccatgtacggcgcttaccaccacatcaccgtgctgggcaaggagaacgccccctgcgaccacaagtacgacgtggtgggcggtctgtgcgagaataacgacaagtttgccgttgaccggatgctgcccaagatcgacatcggggatatcctttacatccacgataccggtgcccacggctctgctatgggctacaactacaacggcaagctgcactgcgccgaggtgctgctgtgcgaggacggctctcaccggctgatccgccgcgcccagaccccccgcgattactttgcaacgctggactttttgccctttatgaagcccctgtttgaggactgatccgcctttgtattctgataaaaacgaggtatgacccatgttttttggctttcagcttacccttggcctgatgatggccttttacggtttttcggtgatcaaaaatccccgcgtgtggggcgatcaggggcgcagggcggtcaaggccgaaaactttgaggaatactgccgtcagaacggccagttctttttaaaggcaggctgcgttgtggcggtgatcggtgcactggatgcgctggtcacgctggatgccctgctgtacgcgctgctgtacatttttggtctggcctttgccttctacccccttacccgctggtgcaagcagaacgagggcttctcctggccgtggccccacgtccagagcgagaaaaagcgcattaaagaactgcgccgcgaacagcaggcacaggagaacgaggaaaaaggggagaagtgatcccccggataaagcatagatcgcaaaagaacaactcccggtcacgccgctaacgtgaccgggagttgttttagtttactgcttgtggatgagcgcttactcggcgtccttcgggtcggtcatcagttccttgatgctgggcacaacgccgcccagattctgcagctcagaggggatgatgattttggtggccttgccgttggcaaccttcgccagcgcttcaaggctgcggatggccagcaccttgtcgctgggcatggcctcgttcagcagacggatggcatcggcgttggccttctgcacagccagaatagcctgtgcttcgccctcagcctccagaatgcgctgctgcttcacagcatcggcgcgcaggatggcagattccttttcgccctcggcggcggtaatggcggcctgcttttcaccgtctgccttcaggatgacggcgcgcttctcgcgctcagccttcatctgcttttccatggcttcctgaatttcccgcggcgggatgatgttcttcacctccacgcggttcaccttgatgccccacttgtcggtggcttcgtcaaggatagcggtgatcttgccgttgatgacatcgcggctggtcagggtgtgatccagctccatctcaccaatgatgttgcgcagggtggtggcagaaaggctctcgatggcggcaatgggctggttgacaccgtaggtgtacagctttgcgtccatgacctgaaagaacaccacggtgtcgatctgcatagtcacgttatcgcgggtgatcacaggctgagggggaaagtctgcaacttgctccttcaggcttacctttttggcaatgcgctcaataaaggggatcttgacgtgcaggccggcagtccatgtatcggagtagctgcccagccgctcaatgacatataccttggactgcggcacgatgacgatgttggaaacaatgaccagcaccagaacaaaaacaagcgcaaggatgacaaaaaacagaaccatagtgcatctcctttgtcaggttgttgtgtgggggttacggctttcggtcagaacaggctctacgatgagcagggtgctgtggatctcggtaacgcggcaaagcgcaccggggtcaagggtgtcgccgggggtggcgcagcgggcgttccagtccacgccgtccagccgcacccggccggggacttcggcggtgacaggggaaagcacagtggcctcccgtcccagattgcggtcgccgttggtggcggtatgtttgagccgcagctttgccgccagcgggcggaaggctgcaaggcacaggatgcttaccaccagaaagaccaccgcctgcacccggaacgacccggtgaacacgcagcacagcaatgcggcggcagagccgatggcaaaccagatggaggtcatattaaaggtgctggcctccagtgccagaaagcccacggctgcagccagccagagaataggggagatctgcatggtatgttacctccttatgctgctattatacggcatccccttgggggaaggtcaagagttttttactggaacgttgcacagaaaacaaaatatagacaaaaatggaaaagaaaggatgaaaatgggacagcaaaacacccaaaaggtatttcgctgtcccgaaaaattgatttactggatatcgtagtagctgtggttggggttgtggccgttttcttccaccacgatggtaaagcccatggggttcacctcggtgtgcttgccagaagccagcggctctacgatgatgtgctcagagcggttcacgatgatctccgcagtctcggtcttgccgatgcgctggtagtgcaggatgccgtcctcagcccgcagcacccgcagctcaccggtgcggaaggcttcgcagctgtggcgcagctgcgccagctgtgccagcaccgggcgcagacgctcctcgtggctgtcccagcagaagaaagcgcggttgaaggggtcgcggtagccctgcatcccgatctcatcgccgtagtaaaggcagggtacgccgggcagggtgtagatgatggcataggccatgcgcaggcgcagcatcccttcctcgtaggcttcgccggtcacgctgcggccgctctgccactcccggccgcgtccgttggcgggctcgtccgcgatcacggtcagggcgcgctcggtgtcgtgggtagacaaaaagttcagtgccgtgttgatggcaggggcagggtagtgctcgcagatggaaaggatctcgttggcggcctgctgggcaggtttgcccttgacaaaatccagcacggaattcttgaaggggtagttcatcacgctgtccagccccttgcccagcaggtaggtgcggcggtggtcaaagccgaacttggttgtggcgtcctcccacacctcgcccagcaaaaacttttccgggcttacccgcttgacggcggtgcggatcttctcaataaattcgtccggcagctcgtcggccacatccagacggaaaccggcagcaccccgacgcagccatgtgtcgatgacgccgccctcgccggtgatgaactccacaaaggagggggtctcctcattgacctccggcagggtctcgaagccccaccagctgcggtagccgcccttgtacttggggtcaaagtcgtaccagctgcggtagggggagttggggtcgcggtaagcgccgccctcgccgtagcggccctcgcggttgaagtaccggctgtccgagccggtgtggctgaacacgccgtccagcacgatgccgatgccgtacttggcagcctcgcggcagagcacttcaaactcctcgttggtgcccagcagcgggtccacgttcaggtagtcggcggtgttgtagcggtggttggagtgcgcctcaaagatggggttcaggtacaggtaatccacgcccatctcccgcagataggggagcttgatgcggatgccctctaaatcgccgccgaagtagtcctcgttcaggtgaccgccggtctcgttgggctgccagaagggctcggcgtgcttatcggcctgatacagccgatccgggaagggcatgggcttgttctcaatgccctcacagaaccggtccgggaagatctggtagaacaccttgcccttgatgcattcgggcgtctggaaatccggctcatagaccgtgatctgccagctttcgccctcctgccagctgaccacgccgcagttgtctgccccgcgcacgatgcggcggaagtcggtatacagatcaaaatagtagaagtataggcccgggtcgcccagcacaacatccaccgaaaaatggttctggtggggcgtctggccgtcaaatttcatgcggtagtgcacgggcacatcgtatttgccctccttttgcagcacaaggtgtgggtccacatagcccagctcctcggggatgcacagggtcaggtgcacgctctgcccggcgcgcacggcaccaaagggctgtttaaagtaggggtcgtagctgttgaacagacaagacaaaaaagatcgtcctttctcaaaaaagccccggcgggcgaaatgccaccggggctttgcggttttacaggggaaaattacttgcccatgggcacgggggaagcgtaccagatatcgcgggcgtagtccagcacggcgcggtctgcgctgaagatgccgctgttggcaatgttcttcaggctcatgcgggcccaagtctcgcggtcagcatacagcttctgcaggtcggcctgtgcacggcggtagtccttgaagtcggccatgaccatgtacgggtcgctgctgcgcaggttctcggtgacctcgtggaagttctcaccgttccagccgcgctccaggaagttcagggcgctgttggccacgtcgtcgcccatgataaaggcgttggggtggtagcccacctgcttcaggttgttcacctcgggggtcagcataccgaagatcagctcgttctccttaccggcagcatcggcgatctccacgtttgcaccgtccagagtgcccagcgtgatggcaccgttcagcatgaacttcatgttgccggtaccggaagcctcggtgccggccagagagatctgctcagagacctcggcagcgggcatcaggtgctcgctcagggagacacaatactcctccagatacaccacgcgcagcttctcacgcacggcggggtcgttgttgatcaggtcgcccagcttgcagatcatgcggatcatctgctttgccatgtagtagccgggagcagcctttgcgccgaagatgtaggtcttggggatgaagtcggcgttggggttctccttcaggtacaggtactgtgcagcgatgttcagcgcattcaggtgctggcgcttgtactcgtgcatacgcttgacctggcagtcaaagatggaattggggtcgatgacctgaccggtgctctttgccagatagcttgcaaagtcctttttgttggccagcttgatctcgttcagcttcttcagcacggtcttgtcgtcggcgtacttgttcagcttggtcagatcggaagcatcgtgcttgtagccgtcgccgatggtctcgtccagcagcttgcacaggccggggttagaagccagcagccagcggcggtatgcaatgccgttggtcacgttcttgaaggcgttgggcttgaacaggtagtaatcgtggaaaacgctttccttgatgatctcgctgtgcagcttggaaacgccgttgatgctgttggcggtgtaggcgcagatgttggccatgcgcacctgattgtcgccgatcagtgccatgtagtcgatcttgccctgatcgccggggaaagcctttgccagctcctcgcgggcgcggcggtccatctccaccacgatctggtagatgcggggcagggtcatcttgaagatgtccacgttccacttctccagagcttcggccataacggtgtggttggtgtaggagaacaccctctggcagatgctgaaggccttgtcccagtcaaagccgcactcatccagcaggatgcgcatcatctcggggatggccagcgtggggtgggtgtcgttcagctggatagcgaccttgtcgggcaggttctccagcgtggcgtagctggacaggtggttctgcacgatatcgccgatagaagcagcggacaggaagtactgctgacgcaggcgcaggatcttgccctcaacgtggttatcgttggggtacagcaccttggagatgagctcggcgttggcgttcttgctcatagcggtgttgtagttgcccagagagaagctggacatatcaaagtccggggcctttgcctgccacagacgcagctttgcaacgccctttccgtcgtagccctgcacatacatatcggaggggatagccatgacgctgttgtagttggtgtgctggatgtagtggaagccgttgtcccagttctcgtggatctcgccgtcaaagcggatctccacagcctgatccgggtggctcttcagccacacctgaccgccgggcagccagttgtcggcgcgctcctgctgccagccgtccacgatcttctgcttgaagatgccgtactcgtacaggatggagtagccggtgccgcagatatcggtggtggccatgccgtccagatagcaggctgccagacggcccagaccgccgttgcccagacctgcatcaggctcttcctcaaaaatgctgtccagattgatgtcggcgtcagccagtgccttcttggcaacctcgtccagacccagattgaacaggctcatcttcaggctgcggcccatcagaaactccatgcagaggtagtagacctgcttggtgccggtgccgatagccttggactggaactttttgtggttctcgctcatcatctgacggcagatcagagccagagagcggtagatctgctggttggaggcaacattcagctccacaccgtactcactggtgagcttgtcctgaagaattttgccaaattcttttgatgtcatagtgtgctcctatccgcataagcgtttgctttgctaaaataattgagtagataatagcagcagaaacgttccctctttcgcccggctgccaacataacaacgttattataatatgaacgatttataaatgcaaggaaacaggcgctttttttccgtaactgctattttttcaggccactttctgacaaatatgccgaaatttcaaaaattacactttttcttgcggcgtatttatattataatagagggtagaactgaaccgcgaaacgtttttcggggagtaattccggcagtaatggggcgggaaactccatcgaaacgttttcggaagccgaaacgtttccgggaacggtgccatgttccggtaaaaagcagaacaaacggccttgcgccgtacagatacaggataaaaaggggaaaacaccatggtaaacaaggtaagggtcaacatcgcgggcacaccgtatgccatcgccaccacagattcggaaaagtacatcctcggtcttgccaaaaagctggacgaggacatcacaaagctgctggacactaacgacaacctttcggtgactaaggcggcggtgttctgcgcgatggattatctggatgaataccgcaagagcaccggcagtgccgagaatatgcgcagccagatccaggactacattgcagatgcagcccgggcaaagctggccgaggacaaggcattggccgagaatgccgtgctgcgccgggaagctgccgccctgcgggagcagcttgccaaggagcgccagcgcgagacccgccgggaagaacgcgccgcccgcgctgcggcagagacggcacaggagcagtccgcagccccggaaaccccggcagcagacagcgcacaggcagacgagaccaactgaatgtaccttatataaatagaagtcagaaggagaactatggcaaggatcgagatcttagccccggtgggcagtgaagaaatgctccgcgcggcggtgttcagcggcgcggacgcagtatatctgggcttttcgggtttcaacgcccgcacgggtgccggcaactttgatgcagacagcctgcaggaggcggtgcgcttctgccacgcccggggcgtggcggtgcacgttgcgctgaatacgaccgtgtacggcacggaattgtcggcgctggagcaggctatccgggcggtggcggccagcggcgcagatgcggtcatctgtcaggatctggcagtggctaccttaattggtaagatcgctccgcagctgccccggcacggttccacccagatgagcgtccacaccctgcagggcgcactggaactgaaggagctgggctttacccgggtggtgctggcgcgtgagctgagcctgcccgaggtggagcacatcacaaagcactgcggcatcgagactgagtgcttcatccacggtgcgctgtgcatgagcgtgagcggccagtgctatatgtccgcctttctgggcggacgcagcggcaaccggggctcttgtgcgggaccctgccgtctgccctttgaagccaacgccctgccggagggcaagcccgggcggctgcatcacctttccctcaaggataactctgccatcgacaagctggacaagctgcaggcgcttggcgtagcatcggcaaaaatagagggccgtctccgcacgccggagtatgtggcggcggcggtcagcgcctgtctggcgggccgcgagggccgcgcctacgaccgcgacctgctgaagaacgctttcagccgctccggtttcacctccgggtatctggacggaaaaatcgacggcacgatgttcggtgtgcgcagcgaagccgacgccgagctgaccaaaaagaccctgcccatgctgcgcgagctttaccgccgcgagcgctcccgcgtgccggtgcagatgaagctggagatcgaagagggcggcgaaaagctgaccgttaccgatgtcgatggcaacaaggcctttgcctatggggacgccgagccgcagcctgcccgcaccgaccccaccgagagcctgaaccgcagcttggcaaagaccggcggcacgccctttacggcagagaagatcaccgtggaaatggacggtgggccgtggttcatccccggcagcgccgtaaacgagctgcgccgggaagcactggatgtcctgctcaaaaagcgggaggtgctgcgcccgtggcctaccaccgaggagcacgtcgccgccctgccgcagcgtaccctgccgccccgccgcaccctgcgcgcccggttcgagcgctgggaacaggtgccggagcgggcgcttgacggggtggagtacatcattttgcccattgcgcaggccgaccgtgtgccccgggagtggcgggctaagaccattctggagctgccccgggtcatgtttggtgcgttggaacaggacaccgcccgccgcatcgcagccacgcaggatgcgggctttgccgggtacgaggtcagcaacatcgcccacctgcggctgtgccgtgggctgcctatgaccggcggcttcgggctgaacatcaccaacaatgcggcggcgcagttctatgcagagcaggggctttccagcctgcttattctgccggaggtgaaggacagcgatattgcgtccattgcacccacccggaacggtaagcctgtgcccaccggcgtgatgatctacggccatatgccgctgatgcttacccgcgcctgcccgctgcagaacatccacgactgcgcccactgcgacaagaccggcgtgctgaccgaccgcaaggccaaaaagttcccggtgcgctgcggccttggggtgcgcaccatctataaccctgtgcccatctacatgggtgacaagcccggtgcactggcggtggactacggcgtggcctactttacgctggaatcccgcgaggaagcagcgcagattttggaaatgatccgcacccacgccccctttgagggcgattttacccgcggcctgtattttaaagggacgaactgacaggaagctaccggcattgcctcaagctttgccagcgaaaaaacagaaaaatgaaacgaggttatacgatggaacccatcactgtaaaatataaggtactggatgcccgggcaaaggtgcccgcctatgccacccccggcgcagctgctgccgacctgtgcgctgtgctggacgcaccgctgaccgttgcccccatgcagcgggtgctggtacccaccggtcttgccatcgagctgccgggtgcccacagcgtagcgctggtgtacgcccgcagcggcctgtccatcaagcacggcctgtgcatggccaacggcgtgggcgtggtggacagcgactatcgcggcgagctgaaggtgcccatggtcaatctgggtgccgaggcttacaccatccagcccggcgagcgggtggcgcagctgtgcatcgctccggtatacaccgccgcctttgtgcccgccgaggagctgggcgatacccagcgcggcgcgggcggctttggctctaccggccgctaaagaagggaacacggagaaaatgaaggaaaataacctgatcttagcttctggcagcccccgcagacgggaattgctctccctatataccaccgactttacggtctgcgtcagcgattttgacgagagcgccgtcacagcacccaccccggcgcagctggtggagcagctggctatcggcaagtgccttgcggtggcaaagcagcacccggatgccgtggtcatcggctgcgacacggtggtggatgtggatggcaccgtgttcggcaagccccgcgatgcagaggacgccaagcggatgctgcgtgccctttccggcaagacccatcaggtgcacaccggtgtgtgcattgcaaaaggggacagggcagagcattttgtggacagctgcaaggtgacctttttcccgctgggggaggaggagatcgcgttctacaccgctaccccggagccttacgataaggccggtgcctatgccattcaggggcgcgcggctctgtggctggaccgcatcgagggcgactactacaccattatggggctgccggtcagccgcaccgtacagctgctggcgcattttttgtgagaaaaatggaaaaatgatagaaaacttgccgaaacgcttgagaaatgaagcacttgcggctataatagaaccgtgttattctgcgcaggagggtctgtttacagcagactgtccggcattctgggatagatttaaggaacgatcgtaaggagatttggaacaatgagttttctgtcaaaggacgttggcattgatctgggtactgccaatactctggtctacatgaagggcaagggcatcatcatgcgcgagccctcggtcgtggcggtggacaccaagaccgatgaggtgcgctgcgtgggcggcgaggcaaaggctgtcatcggccgtacccccggcagcatcgtggcggtgcgtcccctgaaggacggcgtcatcgctgatttcgacatcaccgcaaatatgctggagaacttcctcaaaaaggcctgcggcaacagtatgttctcccgtccccgggtggtcatctgcatcccctccggcgttaccgaggtggagcgccgcgctgtgcgcgaagctaccctgaaggccggtgcccgtcaggtgtctgtgattgaggagcccatggctgctgccatcggtgcaggcctgcccatcagcgagcccaccggcagcatgatcgtggatatcggcggcggcacggcggagatcgccgtcatctctctgggcggcatcgtggcctcccgcagcgtgcgcatggccggtgatatgttcgatcaggccatcatcgccttcatcaagcgcaagtacaacctgctcatcggcgagcgcactgccgagcagatcaagatcgagatcggctctgcctatgtgctggacccggagctgaccatggagatcaagggccgcaaccttgtggacggcctgcccaagaacatcgtggtgcactctgaggatgtgcgcggcgctctgctggagtgtctggtcaagatcaccactgccatcaaggagacgctggagcgcaccccgccggagctgagcgcggatatcatcgaccgcggcattaccctgaccggcggcggcgctctgctgcgcggtctggatcagctgatccagagcgagaccggtattgatgtgcatattgcggaggatccgctggactgcgtggccaagggtgccggtgcggtgctggatcatgtggacgtgctgcatgatgtgctggacaccgatggaggacatatgtaagagcggctctctggggagagtgctgctcagaatgcggaaaagtttcagacacagcagctgtgcgttttttccgctgcaaacactgcatcttgcgcggatggcacggctgtccgcgcttttttcatgcaagggcctgcggtagggcgcgggcatcccgacaggagggaaggaccctttgaaagatttttttgatacttggaaattcaagatccttgtggccgtggcggtatttctggtgggcatcatggcctacgccggtgccaacggacgactgaccgctgccccgcaggagctgctgggcgtgatcctgacccctttccagaaggcggcagctgtggtcagcggcggcgtaggtgcggtgtgggaaaaatacaccagcatcgacaaagtcatggagcagaacgagcagctggaaacggaaaacgccgagctgcgccagcagatggtggactacgaccgtatcaaggctgaaaacgaagcctacaaggcgctggccaatattcagaaaaagaacagcaacgccacctatgtgtccggttttgtcatcggccgcgacccgctggacgagtttggcggtttcacgctggacaagggcaccgcagacggtgtggcggtgaacaatgccgtcatcagcgaccggggctatctgctgggcatggtggtggaggctgacccgaccagctgcaaggtaatgaccatcctgcaccccagcttcaatgcggcgggcgtggtctcccgcacccgggaaaacggcatcctgaacggcaacaccacctatgcgccggacggcctgtgcaccctgaccaatctggagcgcagcaccgagacccgtgcgggcgatcaggtcatcaccaccggtctgggcggggtgttcccgccggatcttctggtgggcacggtgcaggatgtggtgccggaagccagcggcaaatcctccattgcggtggtgcgccccggtgccgacccccgcaccgccaagcacgtttttatcattactgcgtactaaggagggcacactgctatggaatctcgccgcaagcgcagccgcagccagctgctgaagtggggctgctatgtgctggcgctgtttgtgtgcgccgcgttgcagaccacgcccgggctttttcagctggggcaggcaaagccgctgctggtgctgccgctgtgtttggcggtggcagtatttgaaggggagttcgccggggcgctgctgggcacggtgggcggccttttgtgggactacgccgccgggcgcacggtgggtatgctggcgctggaactgctgctgctctgctttggggtatcggtgctggtgcagctgtatctgcaggtgaaccccggcaactttgccgccgtaaatactatgacggcgctgctggtgctctcgctggactggctgtttttctattatatgccgggctatgccggcgctgcgctgcggtacattgcctttgtactgcccagtgcagtgctgaccctcccggcggcgctgctggccttctggctggtgcagcgtatccatgacgggttcaggatcgacaacggtgtggtctgacccgtaaaaggagaaccagatgaacgaaaatgaacgcaaggtcgtggtgcggcggatgctgctgctcatcgcagtggcctgcatcatcatggggctgtacaccttccggctgatctttctgcagctggtcaatggggatagtttcaaggcaaaagccaccaacaccacggattataagttcacggtcaccgccgcgcgcggcaatatcgtggacagcaccggcaagcgcatcgccaccaccagcaccggctataatgtggtgctgaacaagctgcagatgggggatcaggatctggacaccatgctgcagcagatcgtggaacttttgcgcaagaacgatgaaaaatggctggacaccctgctcatcagcgagccggatgccgccgggaactatacctttacggacagcgccgacagcaccagcgaccagaaaacgctggctgacatgaaggagacgctgggcttgcagcagtacgccaccgccaacgatgtgatggagatgctggtggagaaaaaccatctggaaagcttctccctgccgtggcagcgggtgctggcgggcatccattacgagatggaccggcaggccttttccaacgtgaacaactttgtcatggcggaaaacgtcagtcaggtgacggtggctaccatcaaggagcactctctcacgctgccgggcgtggagatcgtggagaccagcacccgcagctatgagcagggagatatcctccccgccgtgctggggcgtgtgggcaagatcaccgccgaaaagtggaaggtgaccgacgaaaacggtcaggtgacctatccgctcaaggaaaaaggctataacatgaacgatgtgatcggcatctccggccttgagtccgtgtacgaggatgagctgcgcggcaaggacggcgtggagaccatcacccgcaattcggacggcgtgatcgtggataccaagatcaccaccgtgccggagccggggcacaccgtgcagttgaccatcaacagcgactttcagcgggcggtggacaaggcccttgccaacaatatcgacatgatcaaccgggtgtacaacaccggcgatatgaaagccgccgccggtgctgcggtggtgctggacgtaaaggacggcagcgtgctggcggctgcaaactaccccagctttgaccagaatctgtacgccaccaactattccgagtacagcgccgaccccagcctgcccctgttcaaccgggcgctgcaaggcctgtacactcccggctccacctttaagcctgcggtggcggtggcagcgctggacagcggcctgatcaaccagtactccaccgtcaactgcaccggcgtgtacacctattataaggactaccacccccgctgcacccgccacggccacagcggcaacattgacgtggtcactgccatcaagtggagctgcaacatcttcttctacgacgtgggccgccgcctgaccagtgacgtctacgatgcctacgcctacaagctgggtcttgggcagcgcaccggcgtggaggtaaacgaggccgtgggacggctgaccaaaaagacagacaaaaactacacctcatcgctggatattcaggccgccatcgggcagggcaacacggtagtaagccccatccagctggccacctacgccgctacgctggccaacaacggcgtgcgctaccgcacccattttgtcaaggccattctggataccaacaccggcgaggtgctcagtgagacccagccggaggtgatggatgtcatcgagggcaacggcaacacctttgcgctggtgcggcagggcatgacactggtgcccagcaccatcagcggcaagatctccagctatcccattgccatcgcctgcaagaccggcaccccccagcgcagcgagacctacgcttcgggcaagcactacctgaacgccatgatgatcgcctacctcccggcagacgacccggagatcgccatcggcattacggtggagtacggcggctacggtgcccgtaccggtgatctggtggtggatatcgccaacgcttattttgccatgaaggacggcacgctggaggttgacccctatgtagacccgcgtaccgtggtgcaggaggacgccgcagcggcagataccgccgcccagaccgccccggatgctgcgaatgatgcacagaccgatgcagccgccgcagaaccgcagcagacagctgctcccgcagcggcagcggaggaagaaaataacgatgtactgcttgcacagtaaggcgcagctgcgtgcaaagtgctgaacttgaacgaaaatttgaatattgtgtccaaaaacctgttgtaaatgagttgcgtttgtgatatcatgtataacaaaggaaatttatcaagcgttttatatacaaatgtttcaatagaggagagatctacagatgacgattgccctgatcgcgcatgactccaaaaaggagctgatggttcagttctgcacggcgtactgccgtattctgagccagcataaattggtggcgaccggcactaccggcaaactgatttccgaggccaccggcctgcaggtacagcgttttctggccggtgtgcagggcggcgaccagcagatcgcgtcccgcattgcctgcaacgagatcgacctgctgctgttcttccgcgaccccatcaatgccaagcccagcgagccgaatgagatgaccctgctgcgcctgtgcgatgtgcacaacatccccatggccaccaacatcgccaccgccgaggtgctgatccacggcttggagcgcggagatctggactggcgcgatatcgtgcacccgcagaactaaagtatgcaaaaaagaagcgctgcatcgtatagatgcggcgcttcttttttgtgtggaaagcggttggatcagaccgttccgttcaccttaaaatcctgtgccatctcctgcacatcggcggcggtaaactcgcccaagggcagcagcagacgggcaagggtgtcctgcggcagcgctgccagtgcggcactctcgtccagtgcggcgtccacagcggggcagacggcgtgcacgccgtcactgcccaactccacccgggcgtggtggccggtggcaatatactggatgcccagcttgtcggcagcggtcagcagggcggcaaaccgggcgtcgttgccgctgcccagtacctcggcgggctggtctgccagtgcttctgccttcagcacgatgcactcgatgccgagagcctcggcagcctgccgtgcggctgctgcccaagcgctctggtcagcggccagctgcaccacagccccggccacgccaaagccctgctgctgcaaaatacgcacaacaacgccgcagtccacagtgccgtccatgctgacaagcaccttgtcctgtgtttcgtaggtgtcgaacccgttgccgggcaaaaatgcgtcgctcatgttccttgcctcccgccatgtgctttgctttgtgctacggccagctggtcgcagcgttcgttttccgggtggcctgcgtggccttttacccagacgtaggtgatcttgtgccgtgcttcctgctccagcgcctgtgcccataagtccgggttcagggcaggggagccgtcggcttttttccagccccggcgcttccagcccttggcccagcccttttccagcccgttgatgacatactggctgtcagagcacagccgcacctcacagggctccttgagctggcgcagcgcctcgataaaggccgtcagctccatgcggttgttggtggtgctggcgtcgccgccgctcagttccttttcgtacactttgccgtcaaagcggtagcgcagcaccgcaccccagccgcccgggccggggttgccgctgcaagcgccgtctgtgtacacctctacctgtttcatggggttctccttatagaatagaatacctttatttagcgctattttgcccgggatgtcaagagccaatgtatacgccggcccagttttgccaaaccttggaattgacaaaaccggtgcgagatactatacttagcgtaacaaaatgcgtataggggtgcaccaaaggtgtgcgcccggctgttccggcagaaacgccacggtcgcatcgaacagatggacttacctggccaagaacctcttgcggaaccaacagcgctgctgcaaaaagcacgctgaacgataaattctatacgatgcatcaaccggaagccgatgcagtttcaggtgcttcccctgtgcaaggtgcggctgctctccccggtgggggcgcggcctgacctgcaattgaatctggaggtaaagaatggctcaaacaaaagaaaataaccccgcaccccgtgcaaaagccccggcagcgcccaaggcagctgccgcaaacggcactgctcccgcaggggaaaagcacacccgtcccactacccgccgcccctactataaccgccgcccgcgccgtgcgcagcagcccaaggaggcagcaactcccatccatatctacccgctgggcggtctgggcgaagtcggcaagaacatgaccgtctacgagtgcaacggcgatatgatcatcgtggactgcggtctggtgttcccggacagcgagatgttcggcgtggacatggttatcccggacttcacctttgtggtgcagaacaaggataagatcaagggtctgctcatcacccacggccacgaggatcacattggcagcattccctatctgctgcagaagttcagcctgccggtgtacggcacccgcctgacctgcggcctgatcaaaaacaagctggaggagttcggccttgccggtaagaccaagtttgtggagatcgtgccccggcagaagatcaagctgggctgctttaccgtggagcctatccatgtcaaccactccatcccggatgccgtggcctttgccatcgacagccccgccggtaccatcatccagaccggcgactttaagatcgattacaccccgctggcctgcggcgtgaccgacctgtccaccctgtccgagtacgggcagcgcggtgtgctggccttgctgagcgactccaccaacgcggagcgcccgggctttaccgccaccgagcagaaggtggctgccggtgtgcgcagcctgtttgcccgcgcccgcaataagcgcatcatcattgcgacctttgcgtccaacatctaccgcgtgcagcagatcattgatctggctgtggaggatggccgcaaggtggccttcagcggccgcagcatggtcaacaacaccgccatggcgcaggagctgggctatatgcacatcccggagggaactctgatcagcgtggacgagctgaaccagtacccgccggagcaggtggtgctggtgaccaccggcagtcagggcgagcccctgagcgcgctgagccgtatggcctcctgcagccaccgtcaggtgcgtgtgggccccggcgacttcatcatcatctccgcaaaccccatccccggcaacgaaaagagcgtgaccaagatcgtcaacggtctgctgctgctgggcgcagaggtcatctacgagagtatgtatgatgtgcacgtttccggccacgcctgtcaggaggagcagaagctgatgctcaccctgatcaaacccaagtatttcctgcccgtgcacggcgagtataagcagctgaaaaagcacgccctcaccgctgcaagtctgggcatccccaccagcaatatcctcattgcagaaaacggctccaacgttatcctctcgcaggacgagatgaagctgggcgagccggtgaccgccggtgccgtcatggtggacggccttggtgtgggcgatgtgggcaacgtggtgctgcgggaccgcaagcacctctccgaggatggccttgtcatcatcgtggctaccgtggacagcaagaccggcaaggtgctggccgggccggatctggtaagccggggcttcgtgtatgtgcgcgagaacgagagcctgatggacggtgcccagagcattgtggaaaatgcactggagcgctgtgtggacgagcacgtccgagactggaacagcgtaaagacccgcgtgcgtgaggcactgagcagctatatctaccggcgcaccaagcgcagcccgatgatcctgccgatcctgatggaggtctgatccgggcgcaccgcaaggcggtgcagcgtctgaggaggcaaaaaaccaatgaaacgtaaaccaagatggacactggaaatgctcacggccagtctggcggtgctgtgcggtcttttgctgctggtgctgctggtgcagcgccccacggcatggccgctgctggctgtgctggtggtgctgtggggcataggggcaaccttgttccgctgcaagctgcgcagctgggtggtgcgctggacaagcggcaccacctttgaaaaatccaaggtgcagttcagtctggagcccctttcccagcctgcggcgctgctttccggcgagacggtgctgtggtacaacagccagttccgcacccgcctgctgggcgggcaggatgtgctggccagccgggtgcagaagctgctgcccgggctggatctgcagctgtgccgcaagcgcgaggggcagctgctgacccttgccgacggctactggagcgtgcacagttccaccgtgcccggcgaagccgaaagcatgaccctgctggtgctgaacgaggagaccgagctgcgccgcatcgaggcagagtataaggccagccgtccggggtatcttgcctttcagctggacggctacgacgatgtgttcggggatctgatggacagcgagcgcgcccgcctgctggagggcgtcaaccgcattctggaggatatgatcggccgcggcagcggctttctgcgccgggtaggcagcggcggccgctatatcgccgtggtggaggagcgccagctggagcagttcgccaaccgcggctacgatgtgctggataagatccgcgcactggaccccggcgtgagcctttcgatgtccattggtatcggacgcggtgcacgcaccctgcgggaagcgcaggatatggcagagcacgcgctggatatggcgcagggacgcggcggcgatcaggccgctgagatgacgctggacggctttaccttctacggcggcgtgagccacggcgtggaaaagcgcagcaaggtgcgcagccgccttgtggccgaccagctggtcaagttgatcaaggaagccgaccatgtggtcatcatgggtcaccgcatgagcgatctggacgccatcggtgcagctgagggcgtgctgcgcatttgtaagatctgcgatgtgccggcggtcatcgccgtccggcgggacgctacactggctgccagcctgatcgatgcactgtgcaaggcagggcagaaggatgacttcatcgaccccaaggacgccctgcccatcatctccaagcgcaccctgtgcatcgtggtggatacatatcaggtgggtcttgtggaaagcaaggacattctggaaaaatgcggcaaggttgctgttatcgaccaccaccgcaagggtgtgggctacatcgagaatccggcgctggtctgccacgaaccctattcttcctcggccagcgagctggtcaccgagctgttgcagtatgtgggcgagcgggacgacaagcccaaccgcgtggaagccgaaggtctgcttgccggcatcctgctggatacgcaggactttaccctgcacaccggtgtgcgcacctttgaagctgctgctgctctgcgccgctacggcgcagagaccgagcgggtgcgcaggttgttcgatgtgaccatggtggagtacaacgccaaggccgatctggtggaaaaggcgcagatgtacaaaaactgtgccatctccatcggcggcgaggtggccccggaagcccgggtcgccattgcgcaggccgccaacgacctgctgcgcattcagggcgtggacgccagctttgtggcggtgcaggtgggcaacggggtcaacgtctctgcccgcagcatgggtgccgtgaatgtgcaggtgatcatggagtcgctgggcggcggcggtcatcagaccatggcagcagcgcagctgaagcatatcaccccgcaggcggcacgcagccgcattcaggacgccatcgaccaatattatctctcccagaaaaagactacgccggaagcacgaccggcaaaaggggaataaaacatgaaacagtatgattatcttatcgttggtgccggtctgttcggtgccgtgtttgcccacgaggccaaaaaggcaggcaaaaagtgtctggtcgttgataagcgcgaccatatcgcgggcaacatctacaccgaagctgtggagggcatcaatgtgcaccgctacggtgcgcatatcttccacaccaataataaggctgtgtggcaatatgtgaaccagtttgtagagttcaaccgctacaccaacagcccggtggccaactaccacggccagatctacaacctgcccttcaacatgaacaccttcaacaagatgtggggcgttgtgacccctgccgaagccaaggccaagatcgaagagcagaaggccgctgcaggcatcaccgacccgcagaaccttgaggagcaggccatcagccttgtgggcaccgatatctacgaaaagctcatcaagggctacaccggcaagcagtggggacgcccctgcaccgaactgcccgcctttatcatcaagcgcctgccggtgcgctttacctacgacgacaactacttcaacgccctgtatcagggcatccccaatggcggctacaccgccatggtggaaaagatgctggccggtaccgaggtgcgcctgaacgtggattatctggcagaaaaggctgcgctggacgcactggctgagaaggtggtctacaccggcccggtggacgcctacttcggctaccgtctgggtgcgctgcagtaccgcagcgtccgctttgagaccgaggtgctggacaccgacaactatcaaggcaacgcggtggtcaactacaccgatgccgagaccccctatacccgcatcatcgagcacaagcactttgagttcggcacccagcccaagaccgtcatcagccgggagtacagcgccgagtggaaaaagggcgacgagccctactatcccgtcaacgatgagaagaacggtgccctgtatgcgcagtacaaggcgctggccgatgccgagccgggtgtgatcttcggcggtcgtctgggcgagtacaagtactacgatatggataaggtcatcgaggtagcactggacgtcgccgcaaaggaactggcataagcggatttctcatggaaatcaactttccgaatgaaggcttcccccggtcgggggaagctgtcaccgaaggtgactgatgagggcgcaggcaagcagcagcttccgggaaaatacccctcatccggcgctatgcgccaccttccccccaaggggtgaaggcttttgctccgaggtaagctgcaaaagttgatttccgtgctgttttcccgcttcctcttgcccaaaaacgacaaatgcgctatactattaccataagactgcaccggttttccggtgagaagtgagggatactatcatgaaagtgattctgaagcaggatatcaagggcatcggcaagaaggacgagatccacgaggtctccgacggctacgcccgcaactacctgttcccgcgcaagctggccgctgtggcagatgccagcgctgtgaacatggcgcgcggcaaggaggccgcagccgatttccacgaagccgagaatgtggcagccgccaaggctctggctgccaagatcgaaggcaagaccgtgaccatcaaggccaagggcggcgcatccggccgtctgcacggcaaggtgaccggcaaggaagttgccgaggcactggctgcgctggcaggtgcacccatcgacaaaaagaagatcgagctggagaccaaggacatcaaggatgccggcgtgttcaacggcaaggtccgtctgtacgttggcgtcgtggcttccttcaagatccaggtggaagtggaacaggcctgatctgtgtgccgtttgcgccccctcacagcagggggcgctttttggctttacaggatgctttggattttggataaggacaaactactatgccgaacgaacgacgttattccaatgaactgaatctggagagcgtgggcatcaatctgccctacaatatgcaggcggagcagagcgtgctgggcgcggtgctgctcaagcccgacactttgaccgatctggtggagatcatcaagccggaaatgttctacacccggcagaacgcccagatctggacggagatgctacgcctgttcaccaacgaccagaccatcgattttgtcaccctgctggatgcggtggtgtccgatggtgtgttccccagtgcagacgaagctaagatctacctgaccggtctggcagaaacagtgcccagcatctccaatgtaaaggcctacgcccagatcgtgcaggaaaaatatctggtgcgtcaactgatgggtgtcgccaaggacatcttgcaggacgccggggacgagccggacgccgaccttctgctggaaaacgccgagcagcgcatctacgagatccgctccggccgcgattccagcgccctgaccccgctttcgtccagcatggtggaaacgctgaccaacctgcaaaagatcagcggcccggatgcggacaagtacaagggcatccccaccggcttccgtctgctggacaccgtgcttaccggccttggccgcggcgatctggtcattctggcagcccgtcccggtatgggcaagaccagctttgcgctgaacatcgccacccgcgtggccatgcagcagaaggtgccggtggctatcttcagtttggaaatgaccaaggagcagctgactaaccgtatcctctcgtcagaggccggtatcgacagtcaggccttccgtaccggtgcgctgcgcgccgaggactgggagtatctggcgctggccaccgaaaaactgcacgatgcaccgatctatatggatgatacctccggcattaccatcaccgagatgaaggcaaagatccgccgggtgaatcaggatcctgcccgccccaacgtgggtctgatcgtcatcgactatttacagctgatgaccaccggccagcgcagcgagaaccgcgtgcaggagatcagctccatcacccgaaacctgaagatcatggccaaggagctgaatgtgcccatcatcgcgctgagccagctgtcccgtgcggtggaaaagcagggcaacaactccagccaccgcccgcagctttctgacctgcgcgactccggttccatcgagcaggacgcagactgcgttttgttcttgtaccgcgattcctactacgccagccagaacccggacggcgctgaggtggatgccgataccgccgagtgtatcgtggcaaagaaccgtcacggcgagaccagcaccgtgccgctgggctgggatggtgcccacacccgctttatggatgtggacttcaagcgctgatggataccgcgattcttgcccgggtggaggatttctgcacccgggaggggcttttgcagcccggcacaccgctgcagctggcggcggcggtctccggtggggcggacagcatggcgctgctgctcttgctgcggcagctgcagccaaggttcggctatacgctctctgcctgccatgtgaaccacggtctgcgcgggcagagcgccgaccgggacgaagcctttgtgcgggctgaatgcgcccgcttgggtgtgccgctgcgggtgttccatgccgcagagctggcactgcccccggcgcacgccggggaggactgggcgcgccgtctgcgctacacggcctttgtgcagctgcaagggcaggggatagatgccatcgccacggcccatactgcaaatgaccaagcggaaacgctgctgctgcggctggcgcgcggcaccgggctgcacggtgcgggcggcatccggccaaggcgcgggtgctacctgcgcccgctgctctgcctgagccgcgccgagaccgaggccgtctgccgggcagcggggcagccgtgggtcaccgacgagaccaacgacaccgatgcctacgcccgcaaccggctgcgccacagcgccctgcctgcactggaaagcaccaacgcggcggcggtgcagaatctggcacggttctgtgaaaaggccgcgcgggtggatgcctaccttgccgccggggctgcaaagcttctggcggcggcacgcctgcccggcgcagaaccggcgtggcagctgctgcctttgcaggcggcagacccgctgctgctggaaactgcgctgcacagccttgtggctccggtgcgggacgcagaggaaaaatatgtgcagctgctgtgtgccgtggtgcggcagggcagcggcgcagtacagctgaccggacaggtacgcttttgcgccgggaacggctgtctacggcaggaaacgctgccggacgcgctatcccaacagccggagaacctgccgccgcagctgccctttttgccccaaaaacagccggaattccggctgcgcgggggctggaaggggactgcggagctgttaagagccgattttgaagaaaaaatacaagtcgttcataaaaaagacttaaaaaatcgggcggattatgctagaataactacgttgtacactagtcttgttctgcgtgcccgacagccgggagatcgcttccggcctgcggggcgggggttgagcaaaccgctgcgcaagtggatgaacgaggccggtgtcccgaacgaactgcgggatacgctgccgctgctggccagcggaagcgaaattttatgggtgtgtggagaaggctttgccgatggccttgcaccggacacggaaagcagatggatcctgcacttggatgcagagatcgaaacacaggaggaaaaaacaaatgagtatgcacgatgatatcaagaccgttctggtcagcgaagagcagctgaaggccaaggtggcagagctgggcgctcagatcagccgggactatgccggtaaaaatctggtgctggtgtccatcctcaagggctcggtggtctttatggccgacctgatgcgggctgtgagcatcccctgcaatatcgactttatggtggtctccagctacggcggcagcaacaccatcaccagcggtctggtcaagatcatcaaagatctggacggtgatctgtccggcaaggatgtgctgatcgtggaggacattctggacaccggcgtcaccctgtccaaccttgtgcccatgctcaagatgcgcaacccgaactccgttaagatctgcacgatccttgataagcccagccgccgcaaggccgacatccagccggattacgagggctttcaggtgccggacgagttcgtggtgggctacggtctggactacgatgaaaaataccgcaacctgccctatgtcggcgtgctgaagcccgaggtctacacgaagtaacctgtccattataaaaatccagaactggagttgattttttttgcaaccgaagaaaccccgtttcaatccgctggtgatcgccattgtgctggcagccgtgctgatggtgtggtcggtgctgggcggcaccggcggcagcgccagcggctcctccatggcttattccacggtggtacactattttgagagcaatcaggtcaccaaattctcgctggatctgaataccggcgtgatcaccatgaccctgaaggagggtgcacaggagctgcccaacgctgccgagcagagcaccacccagtccacgggcgggctgctttccggcctgctgtcctcctcttcctctgcccccaccggggtaaagaagaacgatgacggcaccgagacggtcagctataagctgccctacgcccggatgttcgtggatcatgtgtcggactacatcgcccaatacgatgcagccaaccccgatgcacccatggtgtacgactatgtgcccgccaaggagaccatcccctggatggagattttgttctatctggctatgctgggctgcaccggtttcctgctgttctccatgatgcgcggcggtgccggtggcggcggcatcatgaacgtaggcaaggccaaggtgaaggacgagcacgagaacaaaaagactgctacctttgccgatgtggccggtgaggacgaggaaaaagaggagctcaaggaagttgtggagttcctcaagagcccggataagttcaatacgctgggtgcccgcatccctcacggcgtgctgctggtaggccctccgggtaccggtaagaccctgctggcgcgcgcctgtgcaggcgaggccggagtgcccttctattccatctccggctctgactttgtggagatgtacgtcggcgtgggtgcatcccgcgtgcgcgatttgttcgacaaggccaaaaagaccatgccctgcatcatctttattgacgaaatcgatgctgtgggtcgtcagcgcggcgcaggtctgggcggcggtcacgatgagcgcgagcagaccctgaaccagctgctggtggagatggacggctttgaagccaacgacggcatcatcgtcatggccgctaccaaccgtgccgacattctggataaggcgctgctgcgccccggccgctttgaccgtcaggtctatgtgggtctgccggatgtcaagggacgcgaagagatcctgaaggtgcacacccgcaacaagccccttgcaccggacgtctccctgaaggtcattgcccagcgcaccgccggttttgccggtgcagaccttgagaaccttgtcaacgaggccgcgctgctggcagcccgccgcaaccgcaaggccattaccatggaggacatcgaggaagcttccatgaaggtgatggctggccccgaaaagaagagccgcgtggtcaccccggaggagaaaaagctcaccgcctaccacgaggccggtcacgctgtggcaggcttctactgcaagcaccatccccgcgtgcacgagatcaccatcatcccgcgcggtcaggccggcggctacaccatgtatctgcccgagaaggatcgcagctatgtgactaagggcgagatgtttgaggacatcgtgtccagtctgggcggacgcgtggcggagcagttgatcttggaggacatctccaccggtgcttccaacgacctgcagcaggccaccaacatcgcccgccagatgatcacccgctacggcttctccgagcgtctgggacccgtggtctacggcacctcgcaggaggagaccttccttggccgtgattttggtcagggcaagggttacagcgagaccaccgctgccgagatcgacagcgagacccgtgatatcatcgacgaggcttacgagacctgccgccgcactctgaccgagcacatcgaccagctccatgcgctggcaaaggctctgatggagcgcgaaaagctcaacgaggagcagttcaacaccattatggccggcggcaccctgcccccctgcgaggacgcaaagcccgagcaggcgcagcccgaccagaccgtgcagcctgccccggtgcagcccgcagagcctgcccagaccgctgagcgcgccgaacccgccgagcaggccgagcctgcccagccggaagtgccgcagccggatgccccggagcagcaggactaagctttttttaggaaaggagcgagcatcgtggaggaaaattttaacccggtcgcccagacccgcgcaaattactatacccccggcagcccggtgcagttcgtctgcgtggaactgctcaagggggatgtcagcggcgagcacgctgtctgcctgaccttcaagaatatttcccgcgtgaccctgaccgcactggagatccacttcaagtgcaagggcgtggacggtgtgatcctgtgcgaggacaagttcgagtaccgggatctgcaggtaaagcccggcgagctgttcgggcaggacgatgccgtgttcatcacggcaaaggcaatcaccagcgtggatgtttcgctgtgcaatgtgtacaacggcaagcgtgtggtgcatctggacggtatcaagcgtgtgcgtctgcctgcgccccgccgtctggccccggagctgcaaaaggcgctggaagcccgcatgaaccgcaccgggctcaagtatcagccgcaggtgttcgagaacggctggtactgcgcctgcggtgccttccaccccaccgaggaggataccgtttactgctcggagtgcggctgtgaccgcattctgctgcagaacgcgctgaacaccctgttgcagccagccgccccggcagacgagatggaaatgcccctcagcgccccggcggctcccgcagcgtctgctgcggtggaggagcctacccgcatcgtgggtacagctcctgccgccccggcagcgcccgcagaggagcccacccgggtcatgggcgcaacggtttaccagccgaaggcagcccccgtccagcccatctcggagcctacccgggtgctggatgcccccgcccgcgcaccgtattccggcgctgctgtggcagacgagggcacccgcgtgatgcccgccgccgcccgccgtccggctccggctccggtgcgtcagcccgcgcctgtggaagaggacgaggagtacgaggacagccgggacagcgtggcagaagcgctgatccgctgggtgccgcccattacggccatcctgtgtgcagccattgcgctgtgcggctttgtgtactaccagttcgtgctgtaaaataaactatcccggcggagggggcagcgtgccttctccgccttttgtgtgcattgcacagaaaggaaataccatgccggaacaagctttacaggtggcctttgagatcaaaaccgcctgcgatgagatcagccgccgcctgctgcgctggcactgggagcgcaagcccggggcacacagtctggatgcactgctggagcatattgccgcccgcaagcaggaaagcccggattactacgaccgtatgccggaccttaccggcaagaccagctggcagcagctggacaccaccctgtgtatgcgggtgctgctggacccggagaccgatgccgcccgcccgctggatctgctgggcaacacggcacacccctctgccgcacgccatgcctgcaacgccatccgcaccgcccgcaacgaagctgcccacgcggcggttgcagcggacggtgcacaggcagccctgctgttcaacgaagccatcgaggcgctggaggagggctacgccggtaccgcctttaaagaaaacgagctggcgcagtattaccgcgaagccgaggactacctgagccgatgcagcgagggcaaaccccttaaagcgcgccagagcagcccgcagaacgcacagcaggggaaggctgccgcacgcagcaagccccgcgatacccagcaaacccgcaacgccaaaagtaccgccgggcggcagaatacctctgcccgcagccgcagcaccggtacaaaacagagccgcagcacggcatcccgcagcaaaaagcagcagaccggcggcgagagcagggtggcgctgggcattattctggcggcgctggtgctgggacttatcgcacgcgccatcagcatgggacttgtgtaattgcaatgttttgcgattctggcggtaaattggaaagcaaaaacgtttgtgctgtacaaaacaaccaaaaaaacagcagactgtcccgcagaaaaacggtcattgcacctcttgcgggaaatgtgaaacggatttataataagcatgaaaacgtttacacattgccaccgaagagggaacggagaaaataccccatgaccatcagtgatattgcaaagctggcaggtgtttccagcgctgcggtcagccgctatttgaacggcggccccctcagcgaacagaaacgtgccgtgatacaagccgtagtggaaaagaccggttacagcccggacactgccgcccagaccctgcgcaccggcaaggtgcgtcaggtgggggtcatcgtgcccagcatcagctcccagtcggtggggcagatcaccagcggcattgcagccgaactgggtgcaagccgctacctgatgctgctggcagacaccgaactggacgagcagatggaactggaatatcttacagcattgcagcgcaaccatgtagccggtatcattctgctgggctatgattccagcccgcagctgtgcaaggcactgaaggactgccgtgtgcccgtggtggtaacaggacagcgctttgcagacctgccctgcgtttataacgacgaccgcgctgccgcccgcgacctgacccggaagatgctggagcatggccgcagaaatatcgtgtacatcggtggcagcgaacaggacgccgccaccggcattgcccgccgtcagggtgtgcaggacgctctgcgggaggtgggactaaacgcggatggtctgccccgcgcctactgcgccgccttttccatggaagagggacaccgctgcatggaggagctgctggcacgctgcccgcagctggatggtgtggtctgcgtgaccgacaccgtggcctttggcgcgttgcaggtgctgcgcgctgccgggcgcagggtaggggaggatgtcggccttgccggtatcggagacaactgggcgggcaaggtggtggagcccggactgaccaccatccgcttctaccagcggcaggtagggcaggaagctgcccggatgctgctgcaaagcttagaacatactgagccggacgctgcaccggtgcgccagaccacgctgggctatacgctggtagagcgcggctcactgtaaaaaagaggaacgaatgaaacaaaaactgatttttttagatatcgacggcactctgctgcccccgggcgagatgctgatcccccaaagcacggtggaagcgttgcacaaggcgcacgccaacggccacaagctgtttctgtgcactgggcgcaacctgcgcatgacccagccgctgctggactacggctttgacggcgcggtgtgcagcgccggcggctatgtgttctgcggggacaaggtgctggtagacctgcctatggagccgcagctggcaaaggatgtgcgcagcgccatggaacgccacggcgtggagtgcacgctggaagcgcgggatgccacctacggcagcctgaagatgatagagcgctggagctttacccaccgggatgcaggcaatctgaacagcgaagccgcccgttggcgcaaggccatggaggacggcatgaccatgagtccgctggctgattacaagggcgagccgctgtataagattgtgtatatcgcggagcacagcgaggacttggacgaggcgaagcgcctgtacgaggacagattcgtgttctgtgagagcaagctggacggtctggatggcggctatgtgaacggagagctcatcaaccgtaggtttgataaagggcgcggcatcaaggcggtatgtgactatctgggcgtgcccctgcaggacagcatcggctttggcgacagtgacaacgacctgcaaatgaccgatgtggtcggcatcagtgtctgtatggccaacggctctgcaagcctgaagcagcgctgcgaccgcattgccccctcggtgtacgaggacggcatcgccaaggagtttgcagccttggggctgatttgacatatctttgtaaaaagagggcaggggaacgtccgcagatgttcccctgccctaaaattataaataattctcccgcattgttttgcgataaaaggagcaccgcacaaagaactgtgcggtgctccttttggttcataaatcagtagtgcagatcctctgcggtcaggctttccagcacgggcagcatggcagcggcttcggctttggcggcgggcagatccatatcgcggtagttgccgcactccacctcgctggcaccgggcacagcgccctcaaagccagccataaagcggtaggcatccaccgtcagctgcagcgcctgcgccggggtcagcccccgggtgagcaggtaaaagccggtgcggcagcccatggggccaacatagatcaccccgtccttcacagcactgttgcgtgcgtaggttgcaaacaggtgctccagcgtgtgggcagcggcggtggtcaggtaatcgccctgattgggctttttcatgcggatgtcccaggtgagcacatcgccgtcctaacggctcagatacatcccgcgctccagccgggtgtgatccacgcaaaagcttgcgatacgttccatactacgttctcctttatcagccctgcaggcgctgcacactgccgtgtgcgcagtccacagccaccatcagaccatcacggatgtggctggtagcaccggcggcacccacaacggtgggcttcagcagtgccttgccggcaatagcggcgtggctgttcaggccgggctcctctaccaccagagcggcagcgtcgcgcacaaagctcagcatctcgttgctggtggaaggcaccaccagcaccatgccgggcttgaacttggcgcgcacctcgtccatggtgcggcagacgcaggccttaccactggcaacatcgttgttctcggggccgacgcctacgccggtagccagacagttgcctaccatgtggatcttgatcatgttggtggtgccggaaacgcccacgggcacgcctgcggtcacaacagccagctcgccgttgtgcaggtagccgttctccttggccagcgcggtggacatctcaatcagttcatcggtgctgtgtgccagagacatcatcagcggggtgatgccccagctcagggacagctgacgctgcacctgctcgcgcatgacgcaggcaatgatgggctgctgcgggcggtacttgctcagcaggcgggcagtagtgccggactcggacacggtcacgatggcggcggcgttcacatcccgtgcggtcaggcaggcagcatgggcggtagcgtcagagacgctgatcttgccggggttagaatccatcgtgcggccgcgcagatggaaaccctcctgctcggtgcgctcggcgatggcggacatggtcttgagcgcctccacggggtaggcaccggcagcggtctcgccggacagcataatggcagaggtgccgtcgtagatggcgtttgccacgtccgagatctcggcgcgggtggggcgggggttcaccatcatgctgtccagcatctgggtagcggtgacgatgggcttgccgaaggagaaggagcgctcgatgatggtcttctggatgccgggcagctcggtgaagtcgatctccacgcccagatcaccacgggccaccatcacggcgtcggcagcagccagaatgctgtcaatgttgttcacgccctcgcggttctcgatctttgcaatgatgcggatgttggaatcgtactggttcagcaggttgcggatctcgtacacgtcctgtgcggtgcgcacaaaggaggcggcgatgaaatcatagccctgctggatgccgaagatgatgtcatccttatcgcgctggctcatatacggcatggacagatgcacgccgggcacgttgacgcccttcttgttcttgatcttgccgctattcagtacggtgcagacgatgtcggtgtcgttcacggtctggatctgcagcttgatcaggccgtcgtccagcatgatggtgccgcccggctccacgtccatgggcagatccttgtaggtgatggagcagatctcgttggtgccctccacatcgcgggtggtcagggtaaaggtttggccggcaaccagattctcaacgccgttcttgaagtccttcaggcggatctcggggcccttggtgtccagcagtgcagccacgggcttgcccagctcctcgcgcagagccttcagcttttcaaggcgacccagatgctcctcgtgggaaccgtgggaaaaattgaagcgggccacgttcatgccgttggcgatcagatcgcgcagcacgccttccttatcggtggaagggccaagggtgcaaataattttcgtctttctcatgcaatatacctccgtcaactctctcttacctatatccggcacagcatccctgcaggctgctgtgtatgaccaatgggagtaaaagctcccggtacagcgggtcggtttatgtggcagagtggaaaacacaaaactctaccacctattattataatcgttccggcgcaagagagcaagaggaatttttgcttgaatacaagtttttgtatctgtttatgtttgtgagagggattgtggaaaacttaacgatgtggcgcggctttctgtggactgcctgatgggggaaaactgctgtaaaacgtaaaaactgataagagcgcacaaggctgcttcctcttgcatctgaggggctttttgcttataataagggtaataaagtagtactgttccggggtacgcccggagaatggagtgaccattatggaaaaacgtgtttttctgatcgttctggacagctttggcatcggcgcagagccggatgccgctgcctttggcgatgcaggcaccaacaccttgggtgccattgcgaaccaccccaatttcaactgtcccaatctgcgcaagctgggtttgttcaacattgacggcgtgaccgcaggggagaaaacggatgccccggcggctgcctttgcccgcctgcaggagcagagcatgggcaaggataccaccatcggccactgggagattgccggtgtggtcagcccggagccgctgcccaccttccccgagggcttcccggaggagctgatccgggagtatgagcaaaagaccggccacaaggtgctgtgcaacaagccctattccggcacgcaggtgttgaaggactacggcgagcaggccatgcgggaaaacgccctcatcgtgtacaccagcgccgacagcgtttttcaggtggccgccaacgaggagcttgtgccggtgcaggagctgtaccgctactgtgagatcgcccgggaaatgctcaaaggcaagtacggcgtgggccgcgtgatcgcccgccccttccttggcaacagcgcggacaccttctaccgcaccaccaaccgccacgacctgagcctgaagccgccccgcgccaccatgctggatctgctgaaggatgccggtaaggatgtgatcgccgtgggcaagatctacgatatttttgatggcgagggcgtgaccgaaaagatcaagaccaccggcaacaccaacggcattgcctttaccaaggccttgcagacccgggattttgagggtctggctttcgtgaatctggtagactttgatatgctctacggccaccgccgcgatgtggcaggctacgctgccgcagccaccgagttcgaccgttttctggctgacttcctgccggggatgcgggagggcgatctgctcatgatcaccgccgaccacggctgcgacccctcctacaccaagaccaccgaccatacccgcgagtatgtgccgtatctggtctgcggcaagggcgtaaaggcgggtatggatctgggcaccaagctgtgcttcggcaccatcgccaagaccatctgcgagtatctggaagtggacgcttccacgctggacggcaaaagcgtatggcaggagatccgggcataaaacgccccaaaaacagtaagaacaggagcgtgaaacgatgcgtatttataatctgatcgcaaaaaagcgggatggcggcacccacacccgggaagagctggaagctattgtcaacggctttgtctgcggagatgtgaccgactaccagatggctgcatggatgatggcggtgtatctgcgcggcatgaccaacgaagagaccgccgagctgaccgatgtaatggcgcacagcggcgtgatggtagacctttcgcccattccgggcatcaaggtggacaagcactccaccggcggtgtgggcgacaagaccacgctggtcattgcgccaatcgtggcagcctgcggggtgaagatcgctaaaatgagcggccggggcctcggccacaccggcggtaccatcgacaagatggagagcgtgcccggcacaaagaccgccctctcgcaggaggaattttttgcacaggtgaaccggatcggcctgtcggtcatcggccagagcgagggtatcgccgtggcagataaaaagatgtacgccctgcgggacgttaccgccaccgtcagctgcattccgctcatcgcgtccagcatcatgtctaaaaaactggcttccggctcggacgccattctgctggatgtcaccaccggcaccggcgcctttatgaagactgtcgaccagagcatcgagctggcgcagctgatggtcgccatcggtacccaccatggccgccgggtagccgccatgatcaccgatatggacaccccgctgggtcacaacatcggcaacagtctggaagtgatggagagcatggacgtgctcaaaggccacggcccggcagacctgaccgaggtgtgcctgcaactggcagccaatatgctggtgctggcgggcaagggcgatgccgcccactgccgcgctatggccgaggctgtcattgcggacggctctgcctttgaaaagtgcaaggaaatgtttgccgcacagggcggcgatatccgggtactggacgattacagcctgtttgctcagcccgccgccagctacgaactgctggccgagcaggacggctacattgtggccaacgatgccgaaaagatcggctctgccagtgtgctgctgggtgcaggccgtcagaaaaagggcgacccgctggattttgccgccggtatcaccctgcacaaaaagcgcggcgactatgtccataagggcgaaagccttgccaccttctacggcgcagcggacaagtttgaagccgccgccgccgagtaccgcagcggccttatgtacggcgcggaaaagccggaggaagctccgctggtgtacgcccttgtcaccaaggacggcgtagagcggtactaagatcttttacgcggcgggcgtaccccaaagagtggttttatagaagcgaaaatgtaaaaagctgaacacctgttttttgcagatgttcggctttttttgtatgcgttttaagggctgctatgtgcagatatctgccgccacggtatacactgcatgatagtgcagggcatcctcctgcacggtgcactcctcccggcgggcgaagatctccgcatccgggaaagcatcgtgcagcgcccgcagcccctgcagccgtgccagcgtaagcgcctgtgcttcggtgcggtacatcatttcctgctgctgcccgtaatagatggtttcctccaccgcgcagggcaggggcaggccgaaaacctctaattgcagatgccgggtgcggcacagcccgtccccgtcaggcgcagagggggaaagcgcggcagaatgctctgcaaaaaacagcttgtaattcgttgtatttttgccggtcagctgcggcatcgtctctgccagcggaacgctctggtctgtctgccactccagctgcgccaccaccgtgcccgccgccggggcaaagatcaaggtgccgtcccgctcgctgcgcgccgtgccgatcaacccctgcccggcttccacagtctgcccgggggctaccagcatagtgccgctggcaagatttgtacgcagcaccgtcccattgcactttgcccgcagcccgtgcagcgtgcctgcggcgatctcggggcgggcatgggcaggggcggcttccaccgcaagccggcctttttcaaaattcaggcttgcccaagagaactcgccgctttccagcagggcatactctccgcagcgcagcagctcctcggttacggcagtgccgggctgcaggccgcagctgcgcagcactgcacccgcccgcgcccgctgcccggtggtcaggctgccgtagtccaccgcccatataaatccttgcagccagaccagcaccagcccccaagcgacaagccccgcccaaagccccttgcgctgcagcagcggacgcagcaaaaaataaagccccatccgtttttccaatcgcagccgcacccgcctgtgccgggcaagtgcggccagccgccggtactgccaagctgcgcaatgggcgcaaaagccgccgggcagagaagaaatgccatataaatgcagcccttgcccggcagcgtcggtcaaaagcgcctcggggctgccgttccgggcggtaaagcgtacccccgcccaaaggcttgcagcttccatggcagcctcctattcatcggaaaaatcggtgcgcaaaaactgcccctgcaccgtcagccgggcggcggtcagggtacagatgcgcagcccgctgccgtataccgtgaaacgccctttcgccagccgcaggcacagcttgttttcatcaaaaaacaacactgtgcaaaaatgctcgatctccatccggtcgccgctcaggtatacggcagggcggctgtaaaacccgggcggcggctgtcgaaacagcccgcgcagccagtcgcccggggtgcgccggtcgtggtgtgctctggccatctttgtccctcccgtcccgcgctttgtacattgcacagcccatgcttccatatatatggagggggagggcgtgcttatgagtaaaagctgcaaacggctgtatccggggctctttttgctgggtgcagccacagcggcgctggtatttgccgcgccgcagacctgtgcggaagctttgcggcatggtcttgcgctctgcggtgggccgctgctggtgtcgttgtttccttttctggtggtgtcggcgctcatcatgcgcagcggcgcgggcgaggtattaggcgtgctgctctggccggtggtgcgttgtatcggtctgcgcagccgcagcgcgggcagtgtgctgctcatcggtcttgtgggcggctttgcccctgccgccgccgctgctgccgaggcagtccgcagcagggagctgaccccgcaggaagcttcagctctgctgcccgcctgcatctgctccgggccgtcttttgtcattttgacggtaggggagcagctgctgggcagccgcacagccgggatatgcctgtttgctgcacaggtgctggcgggctggctgacagcggcactgctctgccgtgtccgcggcataccggagcctttgcccgcaccgcccaccgccgtgcaagcagcaccgccgccggcgctggatgccatccttgcgcaggcggcagtgacctacctgaaattatgcggctttgtgctgtattttcgcctgctggcggcaggctgtgggctgctgctgcccgcggtgcttgcgccctttccggccatgctgctggaggtgtgctccggctgcgattacgccgcccgcaccggtttgtgggcaagcgggctgtgctgtgccgcgctcagtgtgcagggcgcttcggtgctgctgcaagtgcgcaccctctgcccgccggaggtctcgttcaaacccttgctgtggggcagggtgctgcatctgccgctttcgctggcgctgttttatctgggcttgccggagcgtgccgtggagagcttcaataccctgtgtgcccgggtggtgcccatgcggcgcgtgccgacagactgcgctctgctggtgtttgcggtgtgctgcatcacagcctgcgagacctgccgcctgaccaggaagaaggcacaaaacgcagctccggcaaacaaaaactgctctgcggcttgcaaaccgccgcaaaatgtggtaacataactcttggttatcatattaccaaacgcagcgacggagagagtaggcgctgcctgcacggcaaagagagaagcttcaccggctgaaagggcttccatgtgcggcaggggctgaagttcgctcccgagcggtctgcgcgaacgatgcggacgcatctattagcacaggacggttgcgccccgttacggcgtttgagcgccgcctgcccttgtgcaggcggaaaccgggtggtaccgcggagcagaaatggttacagcttcgtcccttttgcctgagcagtcgggcaggggacggagcttttttgttatactccgctccatgaacacaaagaataaaggagagaaaatccatgcaagcaatgatcgatgagctggccaagcaggccgctgaaagccttggtcaggtgtccagcaaggagacgctggcttccttctggcaggaatacctcagcaaaaacggcaagattcctgccctgatgaagaacctgcgcactgttgcgccggaagagcgccccgccatgggcaagatcatcaacgaactcaagcagaaggtgcaggcagactacgatgccgccgccgagaccgtgaagcaggcagaacttgctgcccgcaacgccgccgagacggtggatatcaccctgcccgccaagacccgctctgtgggcggtctgcacccgttgacgctggtcaccaaccagatcatcgacgtgttctccggtatgggctttgccgtggcagatgccccggagatcgaggatgacgaccacaacttcacccgcctgaacgtgcctaaggatcaccccgcccgtgatatgcaggataccttctatctgtccgatgagtttctgctgcgcacccagacctccggtggccagatccgcaccatggacagccagaagccgcccatcaaggtgctgatccccggccgcgtgttccgctctgactcggacgctacccacagtcccatgttccaccagatggaaggtctggtcgtggataagggcatcacgctgggcgacctgcagggcgcactgaacaccttcgtgcagaagctgttcggcgccgacacccgcacccgcctgcgtccctcctacttcccgttcaccgagcccagcgtggaggtggacgtaagctgcttcgagtgccacggcaagggctgccccctgtgcaagcacaccggctggatcgaggtgctgggcggcggcgttgtcaaccgtaaggtgctggaaaactgcaacatcgacccggacgagtactccggtttcgcctttggcattggcatcgagcgtatcgctatgctgaagtacggcatcaacaacatcggtctgatgttcgagaacaatctgcagttcctcaagcagttccacgaataagaggggagagaacaaacaatgaaagtacctttcagttggttaaaagaattcgttgatatcgatgttaccgcacaggaactggaggagaagctgttctcctgcggtttcgaggtggaagagctcatcccgctggatgccggcatcagcaaggtggtcgtcggcaagatcgtggagatggaaaagcaggagggcacccacctgaccaagtgtgtggtggactgcggcgcttacggccacgagatccgcatcagcaccggtgccgccaacatgaagctgggcgattgcgtgcccaccgcactggatggctccactctgcccggcggcattaccatcaaggcccgcaagatgcagggcgtggagtccaacggtatgctgtgctccggtgcagagctgggtctgaacgatgacctgttcccgggctctgaggtctacggcctgctcatcctgcccgaggattctgtccctggcaccgacatcgcccctgtggtgggtctggacgactacatctttgatatctccatcaccgccaaccgcccggactgccagtctgttctgggcatcgcccgcgaggtggctgctgttctgggcaagcccctgcatatgcccgctatggactataaggcagtctgcgagccggatgcgcccatcaccgtcaaggtggaagcaccggagctgtgcccccgctacatggcacactatgtgcgcaacatccgcatgggcgagtctccccgctggatgaagcgccatctggcactgtgcggcctgcgctccatcagcaacgtggtggatatcaccaaccacaccctgctggagatgggtcagcccatgcacgcttttgacctgaacaaggtcgccggccgcaccattgatgtgcgccgcgcccacgagggtgaaaagatcgtcacgctggacgagaaggaatttaccctcaaccccaacaatctggtcatctgcgatgccgaaaagccggtggcactggccggtattatgggcggcgcaaactccggcatggacgataacaccaccagcctgctgttcgagtgcgccacctttgcccgcgacagcgtccgtaagaccagccgtgcactgggtcagaacagcgattcctctgcccgctacgagaagggcgtggaccgctactctccgcagctgggtctggcacgcgctctgcacctgatccagcagctggattgcggtgatatcactacgctggaatacgatctgaccgatggccgcccgctggagcgcaagcacatcgtcaccaccccggcaaagatctgcggtgtgctgggcatcaccgtgcccgaccagaccatgatcgatattctgcggcgtctggagttcaccgtagatgtgcaggccgatggcagctgggatgtgtccgcacccctgtaccgtgatgacgtggaaagcttcccggatctggccgaggaggtcattcgtgagtacggctacgaccatatcgtgcccaccttcctgaacactgcctccgttaccaacggcggcctgaactacgaccagaagcagcagctcaagaccaagcgtctgctggctgcacagggcttctacgaggcctccacgctggccttctactccaacgctgagctggatatgctgcatatccctgctgaggacgaagcccgcaaggctatccgcatcctgaaccccatcagcgagaacctgtccatcatgcgcactctgctgaccccctccatgctgaacgtcatcgtggacaacctgaaaaagggcaacgccgaaggccgcctgttcgagatggcaccggtctatctggccaaggaactgcccatcaatgagcacccccacgagcgccagaccctctgcatcggtgccttcggccccgaggaggacttcttcaccgtcaagggcgcactggaagcactggcagccggctttggtctgacctttgattatcagcgcgagaccgccgcatggctgcaccccggcatcagcgccgccgtgtactgcaacggtaagcgtctgggcgtgttcggcaagcttgccaacgagatcaacgctgagctggagatcgccaaggagcagaaggacagccagaacatctatctgggcgagctggactatgaggctctgatgtcctgcgtagagggcgagctgcgctataagcccctcagcccctatgcaccggtcaagcgcgatctggctctggtctgcaacgagactgtatcctgcggcgagatcgaggagaccatccgtaaggccagcccgctggtcagcgaggtcaagctgtttgatatttatcgcggcgctaaccttggcgaaggcaaaaagagcatggccttcagcctgtccctgtctgatcccaagaaggaagtctctgctgaggaagtggagcgcgtggtcaagaagatccttggcaacctgaagttcaagctgggcatcgagatccgctgagcatttcacttattatataagtaatttatatatagacccaaggccgtctgtgcagtgcatggacggcctttttgcgtggggagaggggaaaatcacaatatggatgaagcaaactcaattttctttaaaaaaagatgtcaaaaagtgttgacaagcgccccggtgtgtggtattatacttgagcgccaagcgctgagacaaaagaatgacttctgaaagctcagcaggaagcccttgaaaagaaccaatagacgctgaaaaacaccagttgacactgagatgtacgaagcgctccaagttcagaaaagttcaaaagcttctcaaaaaagtgcttgacaatttatcacgaaagtgataaaatgaataagctgtcagccgcaaggctgcggcgcacaggaccttgaaaattgaacaatatcgaaagaacttgtaacggaacctatattcgtgttggaaaaacacggtaaacaattccaaacaaaagtaattcacacaggacgcaagcgattgcgtgctgagcgaaaacaagatttaacacttttaagtgataaatatcatttataaagagtttgatcctggctcaggacgaacgctggcggcgcgcctaacacatgcaagtcgaacgagcgagagagagcttgctttctcgagcgagtggcgaacgggtgagtaacgcgtgaggaacctgcctcaaagagggggacaacagttggaaacgactgctaataccgcataagcccacggctcggcatcgagcagagggaaaaggagcaatccgctttgagatggcctcgcgtccgattagctagttggtgaggtaatggcccaccaaggcgacgatcggtagccggactgagaggttgaacggccacattgggactgagacacggcccagactcctacgggaggcagcagtggggaatattgcacaatgggggaaaccctgatgcagcgacgccgcgtggaggaagaaggtcttcggattgtaaactcctgttgttgaggaagataatgacggtactcaacaaggaagtgacggctaactacgtgccagcagccgcggtaaaacgtaggtcacaagcgttgtccggaattactgggtgtaaagggagcgcaggcgggaagacaagttggaagtgaaatccatgggctcaacccatgaactgctttcaaaactgtttttcttgagtagtgcagaggtaggcggaattcccggtgtagcggtggaatgcgtagatatcgggaggaacaccagtggcgaaggcggcctactgggcaccaactgacgctgaggctcgaaagtgtgggtagcaaacaggattagataccctggtagtccacactgtaaacgatgattactaggtgttggaggattgaccccttcagtgccgcagttaacacaataagtaatccacctggggagtacgaccgcaaggttgaaactcaaaggaattgacgggggcccgcacaagcagtggagtatgtggtttaattcgacgcaacgcgaagaaccttaccaagtcttgacatcccttgacgatgctggaaacagtatttctcttcggagcaaggagacaggtggtgcatggttgtcgtcagctcgtgtcgtgagatgttgggttaagtcccgcaacgagcgcaacccttatggtcagttactacgcaagaggactctggccagactgccgttgacaaaacggaggaaggtggggatgacgtcaaatcatcatgccctttatgacttgggctacacacgtactacaatggcgttaaacaaagagaagcaagaccgcgaggtggagcaaaactcagaaacaacgtcccagttcggactgcaggctgcaactcgcctgcacgaagtcggaattgctagtaatcgcagatcagcatgctgcggtgaatacgttcccgggccttgtacacaccgcccgtcacaccatgagagccggggggacccgaagtcggtagtctaaccgcaaggaggacgccgccgaaggtaaaactggtgattggggtgaagtcgtaacaaggtagccgtaggagaacctgcggctggatcacctcctttctaaggagtcaggcaatgacagagcatctaagatggtcagtcattggaacaggtgacaagttaaagtttaagtagatattgttcgattttgagggccctgaaaaggacactcaaagacgtaccttgaaaactgaataataactgcgaaacaaagattatagtaagttcttttttaagaaatattacaatttcaaaaggaagggtaacaataatcttcgttggcaagagagaatcaagaggataccaaatgttcttgaaagaacgtttgaaaggtcaagcgaacaagggcgcagggcgaatgccttggcactgggagccgatgaaagacgtgataagctgcgataagcttcggggagctgcaaataagcattgatccggagatttctgaatgaggaaactcacctgggttcatactcaggtacgttatactgaacttaaaaataggtatatcgagggaaccgcctgaactgaaacatctaagtagggcgaggaagagacatcaaacgagattccgtaagtagtggcgagcgaacgcggaagagggcaaaccgggagtagaaatacttccggggtacggactgcttttaggacttaatctgttaaccgaacggcatgggaaggccggtcagagagtgtgagaaccacgtaggtgaaaacggagagagctgcgcaggatccagagtacggccagacacgtgaaacctggtcggaatacggggggaccaccctccaaccctaaatactacccagtgaccgatagcgtatagtactgtgaaggaaaggtgaaaagcaccccgggaggggagtgaaaaagaacctgaaaccctgtgcctacaagcacctagagcacgtcaatgtgtgatagggtactttttgtagaacggtccggcgagcgattgtatgcagcaaggttaaggacttaaggtctggagccgaagcgaaagcgagtttgaaaagggcgttaagttgcatacaatgggcccgaaaccgggtgacctacccatggtcaggttgaagtggaagtaaaattccatggaggaccgaaccgacctccgttgaaaaggcggcggatgaactgtgggtagcggagaaattccaatcgaacccggagatagctggttctccccgaaatagttttaggactagccttaagttagatacctggaggtaaagcactgaatagcctagcggccgagaggttagcgaagcttatcaaactcagaatgccagagtattgatgcttgggagtcagacagtgtcagataaatgtcattgtcaaaagggaaacagcccagatctacagctaaggtcccaaagtcaggttaagtggaaaacgatgtgaagatacgtagacaaccaggatgttggctcagaagcagccacacattcaaagagtgcgtaatagctcactggtcgagcgtctttgcgcggagaatttaacggggctaaacctgacaccgaagcttaggcaatacagcaatgtattgggtaggggagcgttgtatacgcggtgaaacagtagcgcaagcggctgtggagtgtatagaagtgagaatgccggaatgagtagcgcgaatgcagtgagaatctgcatggccgaaagcctcaggtttctggaggaaggttcgtccgctccaggttagtcgggagctaaggtgaggcctaacggcgtagccgatgcacagacggtagagattccgtcaccaccaaaagagttaaacacagggacacatttgaagtctcggagccgggtgttggttccggtagcgatcgagggaagttagtaccgaagtccgggatggaagatggcgagaaaagctgtgtgtatttctgcggtgcccgtaccgcaaaccgacacaggtaggtaggaagaagattctaaggccaacgggagaagggttgttaaggaactcggcaaattgaccccgtaacttcgggagaaggggtgctccagagatggagccgcagagaatcggcccaagcaactgtttaccaaaaacacaggtttgtgctaaatcgaaagatgacgtatacgagctgacgcctgcccggtgctggaaggttaagaggagatgtgcaagcattgaatcgaagccccagtgaacggcggccgtaactataacggtcctaaggtagcgaaattccttgtcaggtaagttctgacccgcatgaaaggcgtaatgatttgggcactgtctcgacagcccgcccggcgaaattgtagtaccggtgaagatgccggttacccgcgacaagacggaaagaccccatggagctttactgtagcctaatattgggtttcgatgttgcatgcacaggatagatgggacactgggaaacaagtgctttggcatttgtggagtggccgttgggataccatccttgcgatattggaattctaacctgcgcctttgaatcaaggcgggggacattgttaggtgggcagtttgactggggcggtcgcctcctaaagagtaacggaggcgttcaaaggttcgctcagcttgaacggaaatcaagcaaaagagtgcaaacgcagaagcgagcctaactgcgagactgacgggtcgagcagtaacgaaagttggagttagtgatccggtggtatgtgagtggaaatgccatcgctcaacggataaaagttaccctggggataacaggctgatctcccccaagagtccacatcgacggggaggtttggcacctcgatgtcggctcatcgcatcctggggctgtattcggtcccaagggtttggctgttcgccaattaaagcggtacgcgagctgggttcagaacgtcgtgagacagttcggtccctatctgtcgtgggcgcaggatatttgatgggagctgttcctagtacgagaggaccggagcggacgtacctctggcgcaccagttgttctgccaagggcatagctgggcaactatgtacggatcggataaacgctgaaagcatctaagcgtgaagccgacccaaagataagatatcccattgtttcaaacaagtaagaccccttgaagactacaaggttgataggcacgatgtgtaagtggagtgatccattcagcaagcgtgtactaataggtcgagggcttgaccacaattcgcttgagacttttaagtcaacgaaaaaatgtcagcagtgattattcagttttgaaggcacgtccttctaagaaacactggacagatacacagaaatgtgttatactgattcagtcaaattggtcggtgtcgatgacggtaaggttccacctgttcccattccgaacacagaagttaagcttacttgtgccgaagatagttagctggaaacggcttgtgaaaataggtagtcgccgacttaacaaagagctctgagatgaaagtctcagggcttttttattgcgtttgaatgtctgtatataaaaattacgacgaatagtttagtgaatataacaaattgacaaaaatatacaagggggtataatgaaatcaacaagatacgcaaactatcgtttgcgcatggtgtgaacacaagaaggaggatgttttatgtcaaataaaattgaccgccgcagttttttgaaagtgctaggtattgcgggtgcggcttgtgctatgacggctttgactggctgcgatgaagaaggaactcccagttttcctgcgggggatggctcggtttcactgtcaagcttgaaaccattcaacggtagtgtgccgtggaatggaagatggttacctgaggatccttttggaaatgtttacacaagaggagcaaactatgcaatattcacatacggaagtggctgggggaatacgcgggaaagctggccggatctgaatacggtggtagagtattatgttgaccagaaatatagaaaattgacaatgaaattaaacccctataaagacacggatagcctgagttgggggttggttaaagtctatgtggatgacaaactgacagcaacttcagatgtaatcaaacagaaaacggataaggcaattgaatttaatgtcgatattactggagcaaaatacattaaaattgaaccctatgtaagagaatcggctgattatcttggaggagtaaggtacagcacaggtggtatcatcctgtgggacgttaagctctggaaataaaatagcatataaagcaaaaagtggttccgctgtactgtgcataacagtgcgacggagccgcataccttattaggtagtcgcttatagcaattcaactttttaatgcaacagcaacaccgttgaattgcatatcgcaaatatgccgtttgaatgctgcactaatttcttgacttgcgataaaagctctgagacgaaagtctcagggcttttcttgttgcgttaacataaaaatacatagccgcaaagttgcagggaaaagcgcttttgtctcgtgttaagagatgaaagcgctttatattttgcaaaaaaggatgcgattgatcatgaaacgattccaccgccgctgtcggcggctatgtattctggcggcgctgcttgtgctgctggtactgtttctgcggcagaacgttctgctggatacagccagccgacacgcaatcttattggacgcccaaagcgggcgggtactggcacagaaacgtgccgatgagcgtgctgcaccggcatctctgacaaaaatgatgaccatactgctggccattgaggctgagccggatctggataaacaggtaacactgccggaggatattttcccggccttgcagattgaaaaagcatctatggcaggctttgcgcccggggaggaggtcacggtgcgggacttgctctatggcgcgatgctgccttccggtgcagaatgctgtgagacgctggcacaactggtaagcggcagtgaggataactttgccgcactgatgaaccaaaaggctgcagagcttggtatgaagaatacccattttaccaatcccaccggcctgacggataccgagcactattccagcgcggcagatatggcaaagctgttgcaggcagcactgcacaatgcgacctttcacaccatttttacagcggagcactacaccaccacagcgactgcacagcacccggaaggcgtttcgctgaccagcacactgctgggcaagctggacggaacagagcttccgacgggaacgcagatcgaaggcggcaaaacagggtataccgccgccgcagggctgtgtctggccagccttgccatcgtgaacggaaaagagtacatccttgttacgcttgccgcgcccggagaccacgggacggagcagtacaatatccgcgatgcggtgcatgtgtaccggaaactggcggataaaaaataaccgtgctacactgggatcgccttgcaaactaggtgctccggcggtacaatagggacattctatcatggaaaaggatgtttgactatgcgagacgaagccattgacctgtgcggacagataaattttacccgtaccgatgccatgccgctgctggaacgggatgcacagttccgctttgcctgtgcgggctgcggcaactgctgccgcgggcgggaggatatcgtgctgtccggctatgatttgtggcgtattgctgctcggctgcgtctgccgccgcagatcgtggcacggggctactgccgcagcagcataggcagagtgagccatttaccggtgctgcggcttgctccggtgaaggaaaaccgcaacaactgcccctttctgaccgaaaaccactgcgccatccatgaggcagagccgctggtatgtgcgctgtatccgctggcgcaggagattagccgggcaggggaggtacactattttttacagcccaccggctgcggcgggcaggtgatcgaagcaagggtgcaggattatcttgcccgctacgatgtgcctgcccgggaagccattgatgtgcgctgggcgcagacctgcatggcgctggaagataccgtggagcggttagaagaggtactcagtccggtgctggtgcgccggatgcaggcaaagctctggcaggcactgtattttggttacgattatgcgcaggactatctgccgcagctggaagcaaacctgcaaacactggacacggagctgcgtaaactgacggagtatcagaaaaaacgaaacgatggttcaaaataattgatagatatctttacttgaatcgataataaaggccgttttcagggaaaagtggattgttttgccagtgattctgtgatatacttcacgagtgtaaagcgaaccttgtttgatccgcttacaatatcggcccggagtgcggcgtcctgtcggctgcaagggctgaagatagaggagatcatcaatatgcgtaaaatcactcgtcgttccttcctgactgctggcgttgcctgcggtgcagcagctgctctttctgcctgcggcggttcttcttccgcatcttctgcggcagcatcctccacggttgcttctgcatcggtcgctgccgcttccaacggagaaaagttcaccgttggcatctgccagctggtgcagcacgctgcactggatgccgctacgcagggctttgaggatgcgctgaccgcttcctttggcgagaacgtcaccttcgacttccagaatgcacagggcgattccgctacctgcgccaccattgccaacggttttgtttcctccggcgtggccctgatcatggcaaacgccacccctgctctgcaggctgcacaggctgctaccaacactatccccattctgggtacctccgttaccgagtacggcgtggcgctgggtctggataacttctccggcactgtgggcggcaacgtctccggcacctccgatctggcaccgctggatcagcaggcagacatgatcgtggagtggatgcccgaggtcaaaaaggttggcctgctgtactgctctgccgaggccaacagccagtatcaggtggatgaagtgcagaagtatctggaggctaagggcgtaactgctacccagtacgctttctcggattccaacgatctgtcctccgtctgccagaaggctgcggacgagaacgacgcactgtatgtgcccaccgataacaccgttgccgccaataccggcatcgtggacggcatctgccgcccggctaagaagcctgtgttcgccggtgaggagggcatctgctccggctgcggcgtggctaccctgtccatcagctactacgatctgggctacaccaccggtgagatggcagtcaagatcctgaacggcgagagcgatatctccaccatgcccatcgagtacaccgatgtgaccaaaaagtacaacaaagctgtctgcgatgaccttggcctgaccgcaccggaaggctatgttgagatcgaagcctgataacagcaaaaccggaacaatataaaaatagcggagaagagtagattcttgctcttctccgctttcccgtatcaaagcgggagataaaaaagtgtaacgtttaggaggaaattgttttggagatcattgcaagacttgcaaacctgccgggcgctttaccgggtgcctgtgcgcaggggcttatctggggtatcatggccattggcgtgtacctgacctaccgtattctggatgtagccgacctgaccgtggacggcagctttggcaccggcggcgcggtgtgcgtcatgtgcctgctttccggcatgaacgtctgggcagcattggcggtagcggtgctggctggtctgcttaccggccttgtcaccggcctgctgcacacctttatgggcattcccgccattctggccggcattctgacccagctggcgttgtattccatcaacttgaagatcatgggcaaggccaaccagtctatcaacgtggacaaatacggcctgctcatctccctgcgctgggtcaaggaatttgccctgcataaccccatcatcatggtcatccttgttacggcggtggtcatcggggtactgtactggttcttcggtacggagctgggctgcggcatccgcgctaccggctctaaccctgccatgtcccgcgcacagggcatcaacaccaacttcaacgtcgtgctgggactggctgtctccaatgcgctggtggcgctgtccggtgcgctgctcagccagtatcagggctttgcagatgtcggcatggggcgcggtgccatcgtcatcggtctggctgccgtcatcatcggcgaggccgtgtttggccgcatctttcacaactttgccctcaagctggcctcggtttccatcggcgcgatcatctactatatcgtcattcagctggtgctgacgctgggctttgatgcaaacctgctcaagctgctcagcgcctccgtggtggcggtgttccttgctgtgccgtactggaagggcaaatacttctcgaagccggtcaaaaaggcaaaggaggacgcaaaaaatgcttgagatccaaaatgtttccaaaaccttcaatgcaggcacggtgaaccagaaaaccgccctgaacggtttgaacctgaagctgaacgagggggatttcgtcaccgtcattggcggcaacggtgcgggtaaatccactatgctgaatgccgttgccggtgtgtggccggtggacgagggcaaaattttgatcgacggtgtggacgtcacccgcctgggtgaacatcagcgcgccgcctacattggccgcgtgttccaggaccccatgaccggcactgctgccactatgcagatcgaggaaaatctggcgctggcagcccggcgcggcaagcgccgcaccttgcgcatcggcatcaccaaggctgagcgggagcagtaccgcgagctgctcaagacccttgatctgggccttgaggatcgcctgaccgcccgcgtggggctgctttccggcggtcagcggcaggcgctgaccctgctgatggctaccatgaacaaacccaagctcctgctgctggacgagcacaccgccgcactggaccccaaaacggcgctgaaggtgcttaccctctcggcacgcatcgtggaggaaaaccacctgaccaccatgatgatcacccacaacatgaaggatgccatcaaatacggcaaccgcctgatcatgatgcacgaggggcacatcatctacgatgtggcaggagaggaaaagcagaagctgcacgtctccgacctgctggcaaagttccagatcgccagcggcggcgagtttgccaacgaccgtatgatcctgtccaactaaactgaaacaaaagggcattccatccgcttacgggtggaacgccctttttctgtatcctgcttgcgggcacaaagaaaacaggctccccgccaatggcagggagcctgttgctgtatgcggcttaccgcttgatatcgtagttcatgttcatcaggttgcggatggtgctcacatcatcggtgatgttggcatcaccgtggatggtgtgcttgatggcgctgcttgccactgcaaagttgatcatatccatggccttgtagttgtgcagcatggcgtagatcaagccgctggcaaaggcatcgccgccgcccacgcggtccagaatgttaaaggtgtacagcttgctctcgaaggtatgaccctcgtaccacataaaggccttcaggctgttctcgctgccgctgtgagcgtagcgcacatggcgggcgatgcacttcaggttggggtagcgctcgatgaaccgctggaagatctcgtcctgctgctcgtagctgggctgcaggggcacgccgtccttccagtcgcccttgctgtggtcgttttcgtccttccacaggtggtagggctcaatacccagcagcacgtccacatagggcaggcattcggtgcagaagtcccgtgcctcctcccaagtccacagggtagagcggaagttgccgtcaaagctcacggtcaggcccttcttcttggcaaccttcagcatatcaaggatcaggctgcggcagttgggcgccagtgccggggtaatgccgctgaggtgcagccagtcgtagccgtccagtagagcgtccagatccacctgagaaaaatcgtactcggtaatggcgctgtgcttgcggtcgtagatgaccttggaagcgcggataccgtagccggtctccagataataagtacccagacggttagaaggggtctcgtccggctcggtcaggatcatgggggtgcagtgcacgtcattggagcgcagccagcgcacagcgctcttgcccagactgttgttgggcactacgctgaaaaaggtgctgtccacgccaaggtttgccagcgccagcgcaatgttggcctcgctgccgccgtaactggcctcaaaagccgatgccatgcggatcttttcgtagttcggcggggtcaggcgcagcatgatctcaccacaggtgatgaacttctggccattgggttcgctgccaaggatcggattgaaatgttccataaagctcctcctgatgacattgcggaaatccgcaactattaacacatcgttgtatccattatagtgcgttcccggacagaatgcaagcgtttgcacgcgcagacaagagaaaataaaccataaaatttggtaaagttgccgaaaaaactgccctgccgcaggatcataccccagtcaggtcaaagcttggggtgtattcctccttggcgctgctcttctgctgcatatagccctgcacaagccccttgtccatggcgtagttcaccacccggcggtattcataggtagtgatgcgccgcccgatgccatgctctgcggccttgtagaaaggggtgtactggctcatgacgctgggcagaaagcacccggggtcggcgtcgttccatgcagccatctggtccagcacggcaaagctgtcctccacatgacccggcagcgcgaggtgccgcaggatgacccccttttgcaggatgccgtccgcatcaaacaacggatgcccggcctgtgccatcatggcttcaatggcgggctttgcctgtgcaaagtagtccggcgcggcggaaagctctgcagaaagggcagaggacacatattttaaatcagccagccagatgtcgatgtacccgcgccacgcctgcacgctttccacggtctcgtagccgccggtgttgcacacgatgggcagccgcagccccttggcgcgggcaatgtccagcgcggcaatgatccacggctgccactgacccggggtgaccagattgatgttgtgtgcaccctgcgcctgcaaattcaagaagatctcagccaggtgctccacggtgatctctttgcccagcccctcggcgctgatgggatagttctggcagaagcagcacttgagggtgcagccggaaaagaacaccgtgccgctgccccttgtgccgctgatgcagggctcctcccagtggtgcagggcggcgcgggcagcttttagcgtagtgcctgccccgcagaagccggtgcgcccggcggcacggtttgcaccgcagcggcgggggcagagggtgcagcaggtgggaacggaaatggttttcggcataatatccaaagtcctttgcttaaaattttcgtattcagtataccacttttggtgccattcgtgctatactgaaatacagagaaacgataatacaaaaaacgcaacatctttgcagggcaaggaatgcgttgtgatggaggagaccatgcgcatcgaaaccgatgagatccgcgataatctgaagtatctggctctgttggccagagattacccctcgcaggcggcggccgccagcgagatcatcagcaatcaggcgctgctcaagctgcccaagggtacggagcatttcatgagcgacctgcacggcgagaacgaagccttcgtgcatatcctgaactctgcctccggcgtcatccgggaaaaggtggatgctgtgctgggcggtactatgccggaagcagcccgtgccgagcttgccaccctgatctactatcccaccgaaaagctgccccagctcaaggcgcgctgcaccaccgaggatgcgctggagcagtggtacacccagacccttctccagctgatcgatatctgccgtctggtgtcctccaagcacacccgcgaccatgtgcgcggctgtctgccttccagctgcggctatattctggacgagctgctccatgcccactttgaggatcacgataaagacttgtactacggccagatcgtgggcagcatcattgagaacggccgcgccgaccgctttatcgtgcggctgtgtgagctgatcaagcatctggcggtggataagctgcatatcgtgggcgacctgtttgaccgcggcccgcgcccggacatcattctggatctgttgatgcgccaccataacgtggatatccagtggggcaaccatgacgtggtatggatgggtgctgccgccggcagtcccatctgcatctgcaccgtacttaaaaccacgctggcctaccacaaccacgggatgctggaggactgctacggcatcaatctgcggcacttgcagcgcatggcggagcagttctacggcgaggatgatctttccatctggatgccccacacggacgccgcccgcggcccttatacgcagggaatgctccaccgctgcgccgtgatgcacaaggccatctccatcctcatgttcaagctggaatgtcaggtcatcgaccgcaacccggatttccagatgcaggggcgggattatctgcgccgcatcgactgggacgcccacaccgtgcaggtaggggagaagagttaccccctgcgggacaccgccttccccacggtagacccggcagaccccgcaaagctgaacccggacgagcagctggtactgcaaaaactggtgcagtccttccggcagagcgagaaattacaacagcatattgaatttttgtatgccaagggcagcgtgtaccacattgaaaacggcaatctgctctaccacggcgctgtgcccatgaacacgaagggcggctttgcggtggagcacttcgaggggcgccgctactccggccgtgccctgatggattactgcgacgcccgcgcccgccggggctactatggggcagagggcagcgccgcccgccagagcggacaggattttctgtggtatctttggtgcggcaagctttcgccgctgttcggccgcagtgccatgaccaccttcgagcggctatatatcgcagaccccgctacccatacggaggtcaaggatccctattatagctggtacaacgatgaagccgcctgccgccgtattctggcagagttcggcctgccgggcacgagccatatcgtcaacggccatgtgccggtgcaggagaaaaacggcgagagccccatcaagggcgggggacggctggtggtcatcgatggtgggttctgccgcgcctaccacgaaaagaccggtattgccgggtacacgctggtgtattccagccgcaccatgtccctgcgcacccatcagccctttgaaagcgccgaaaaggcggtgcgggagaatttggacatcctgtcccagaagaacattctggaaaccgaaaatcatcgcatcctcgtggaagatacggacgagggcgaggtgctgcgggagcgcgtgcatgacctgaagcagttggtaacggcctatcagctgggctggattccggaagcgcggtgcgaggatcacgtttggtgatatcgccaaagggtaaaatttgggtcggcattcgtcaaaattaatgaaaaattcaataaatttttggaatatccgcgtgtaatctgggcaaaacagaaaataatgaaacagatacaaatcgggctttgcttttttgtggaagtagtgtataataggatagttataaatctgccccggtgttggtgaatctgtacaccccggcggtataagtaacgagatggaatgctttcagtagccttaacaggcctgtggcacaggcctttgacaaggagatcataaaagtggagaaatttgttattaccggcggtaagcccctgcacggagaagtgaccatttccggcgcaaaaaatgcggctgtgggtattctgcctgctaccattttggcagcggatgtctgcgtgatcgaaaatctgcctgatatcagcgatgtgtcggtcagtctcaagatcctgagcacattgggtgcacaggtgaagatgctcaaccgcaacacctacgagatcgatacgcggcatctggtcaccaccaatgtgccggacgacctgtcccgtcagatgcgcgccagctactacttccttggcgcactgctttcccgcttcggcaaggcacaggttgccatgcccggcggctgcaatctgggcccccgccccatcgaccagcatctgaaggtgttcagcgcgctgggcgcagaggacagcgtggattacggcatgatcaccgtgcgcaccaagcaggagctgaccggtgcccatatcttctttgataaggtcagcgtgggcgctaccatgaacggtatgctctctgcggtcatggccaagggtcagaccattctggaaaactgcgccaaggagccccatgtggtggatctggcaaactttttgaatatgtgcggcgcagacgtgcgcggtgccggtacggacgtcatcaaggtgcgcggcgtggaaaagatgcacggctgcacctacagcatcatcccggatcagatcgaagccggcagctatatggtagctgctgctgccaccggcggcgatgtgctcattaagaacgtcacccccaagcacttggaacccatcacagccaagctgcgccgcgctgggattaccgtggaagaatttgacgatgcagtgcgggtatcccgcaccggcgatattctgccgctgaagatcaacaccatgccgcaccctggcttccccaccgatatgcagcccctgatgggtgtgctgctgagcgtggccaagggcaccagcaccatcaccgagagcgtgtgggacaaccgcttccgctatgtggacgagctgcgcaagatgggtgccagcgtgcaggtggacggtcaggtggccgtatttgagggcgtggaaaagctcagccccgcaccgctgcgcgcctccgacctgcgtgccggtgctgctatggtggtggctgctctgatggccgatggcactagcgagatcgaggagatcggtcatatcgagcgcggctacgagaatatcgtggaaaagctgcgcggtctgggtgcagagatcagcaaggtggagcggatgcccgctgcactggaacaggctctgtaacacatacaaaaacaaacagcctgccgtaaattttgtgcggcgggctgtttttgggtggtaacataagaggttttcatggcagagttcatttcattgtattccggctcctccggcaacagcagcgtggtgcgctgcggcgcacagtaccttatcgtggatatgggcaagggggtgcgcaccaccacggcagcgctcaaatcgctggggcttgccatcagcgattgcgcaggcatccttgtcacccacgagcacagcgaccacgtcaaggggctttccaccttcctgaaaaagaacccgctgccggtgtacggcgcagcggctacgctggattttctggatgccaacgatatcgtgcccgctaactgtgcgctgaacgcgctggagggcagggaagaggacatcggctgcttcggggtgcagtctttccccaccagccacgacgtgccctgtgtgggctaccgcatccacaccccggacgataagaccatgaccatcgccaccgaccttggcaccctgaccccgccggtgcacgaagcgctttccggctgcgaccttgtggcgctggaaagcaactacgacctgcatatgctgcgcagcgggccctacccctactatctgcgcgcccgcatcgagagcgtgcggggacacctttccaacgacgagtgctccgcaaagctcttggagctgatccagagcggctgcaaaaagttcgctctgtgccatctctcgcaggagaataacacgcccagccttgccctgcagaccgtgttcaccaccttgggtgcagccggtgttgtgccggaaaaagactgcatcgtgcaggcacagcgccgcaacgaggtaagccctgcattgacgttctgatttgtcaaacaataaagccatctgcaacagctgatcccgagggtttcaaatcccggtcatgctgcggcagatggcttcttctttgcgcggtgatccgcacttattttgcaattgcttctctcaaaaaatgtgcaactccggcagaaatgaaacgacttattctgcggctttttgcacccggatatcactgcccaaaaactggatctgtacaaaggctgcaaggcggctggagatcttttccgtatacagcttttccagcagcgcaccgtccgtgatgttggttgtgacgatggtgggcagctttgcgcccaagcggttattcagcagactgtacagatttgtcaggaagaagctggaattgaactcggtgcccagatcatccagaatcagcaggtcagcgttgcaggcagtctggaacaaagtctcttcctcgccgccggggtctgtgccgaaatgcagcgcttccagcttgccgaaaaagtccgggcaggagacatagatcacatcgtagttctgccgcagcacctccccggcaatggcaagggcggcatgggtcttgcccagacctgcgttacccaccagcagcaggctttcgcgggtagcgggggagaagtccgcggcgtaatcccgcaggtcagccagaacctcggccatgtagctgcgcacgctctcgcccagcgccttgtccaccgtgttggggtagtagtccagctgcatggtgtcaaagctggagacagacaggctggacagttcctcaatctccttccggcgcagctgctgcatcacccggcgcacacagtcgcaggtgcggccgtccaccgcgccggtgtcctcgcactgcttgcaggtgaacttcggctccagcgcatccgcagggcgtccgctcccggccagcagggcggtcagcttctgctttgccgccgcaagggcagcagcagtctcggtacggtccttgccggaagctccggcaatggcgcagcggatgccccgtacccgcacttcctcctcggcgtggcgcagcccgggaatggcggcttcggcttcggcttgtgcatcctgtgccaaggcgcgggcggtctgccgccgcatggccacggtgcgcaatgcctgctgatacaattcgtttttggtacgcataaaggctccttactccggtttcttgatcagggaacggcggcgggtggcgtttttcaggatatcgtttccgctgggtgtgtcgcggtctacccggatattccggcttgctccggctgcggccaccgggccgcgcacatcgtggatgctgcgcagccccttggcgttccatgttttaaggatgctgttccagtaccacaggtcgcgcttcgggccggcctgtacggcggcttcctgcaccatggcgtcatcgtagccgtacacctcgtaccagcgtgcaatggctttgcgcccgcccagtgtcagctcctcgggggagatctgcagcaggctgctgacgtactcctcgcggctctggcgcagtgccagcagctttaagtgggcatcggcctgctcgccggtctccacgccctcggcgcgccagaccttcagttcgtgggtcacagcggccatggtacgtttgccccggctggctacataggccacgcagagcatcacagcttcaggcgcaaagccctcctgcacatacaggttcaccagcttttccatttcggtgtgggtcagcggacgggcaaagctggtctgcccgcagtcgatcaggctggagatcatggggtcagtgcggctggcagcggcgatctccgcccagcgcatgggggcgggagcactgggctctgcgcccggcgcggcgttttcttcgtagcgctccaaaagccctgcacctgcccagaaagccagcgcactttctgcactgatgcgactgcgcagcttgaggtcggcgcagatcttgtccgggtcggtcacgccggtggccagcacatacagcgccacccgcacattgtattcttcggcaatgcccagcttggagaacaccagctgcggcacggcgatcgtatcgcccttcagttctttcaaacggtagatcatggtttcctcgttcggttcattcgttggcagtatccggctcggcgggcggctcccaagggtcgcagtccatcatgtccgggcagttgttccagcgctccggctcggcatcgtaggcgtccttcagatactgcgcggcggcggcacgcccttcgtccgtaagcggaaatacctcccggcggcgcagggcggggtcggtcttgtcgatcgtccaaggcgcgggccagtagtccacagtgaggatcttttcctccttggtggcatccgcgccgctgtccggatccggcacggtgcgtttgcccggcgtaagccggtagcgcagtccggcttcgttgccgctgtaatcattcttgcacaaaaagtagtgcagcaggggaacaaagatcatggtgaagctcgtcctttccggcaaaaggcgcagccttttgcgcaatcaattctattataaagcagccgggctaaaatgcaataactttttgtgaaacgccctgcaaaagctgccccgcttacaggaaatccggccttgacagtgcagcagaaatatggtaaaatattgcctgttgcagcagatgtgcaatgtgctactgtggctcagctggtagagcagctcactcgtaatgagcaggtcgcctgttcgaatcaggtcagtagctccaaagggaagcccccgaaagttggcttgtgaagccgattttcgggggcttttatttgtgcggcaggggatgggaaagtgggaggttgtgccttaattacccctgtttatctggaaattgccttaatgagtggcgcaagaagtggcgcaataaaagcacggtgcaaactgcatcgtgctaaaaatgggcaaacctaaaccacggtgcgtgtgcatcgtggtttaggtgatgattttggatgtcaaatccagaatttcatcgtacaaggcttctaactccttgccgtactgtgtgatgttttgctgatctggagtcaagccttttgtagtgatttcttcggtcagaatgatttgcagtagacgaagattttcggtctgtacagtgttggttgactcgtcaagtgagattgcagaacccaatttacttagattcacgttttatatactgatcctcaaagggcaaaaagttctttgaggatatttttattgtcattttgctgcaatttttcgacggttcttcggcataacgcagaaaatgcagaaaccgcttgatttgattcggtttccacactagaatggaaaccggaaaagcaaatacagtttccacaaggaggacgctcatgcaggaaaagctcgatgcgctggtgcgcacgcaggccatgcagctgttccgtcaacaggggctgcatttcaccatgcagcaggtggcagagccgctgcatatcagcaaaaagaccatctacaccgtttatccttccaaggagacgcttttgctggacatggtagaccacgcctttgcagacatccaccgctgcaagcaggagattctggcgggcagcggtactttgcaggaaaagctgcgggcagttatcattgctatgccggcagaatacgccgctttggatctgcgacagatgaaggaactggacgagaaatacccggtggtggcggcgcgggtgcgcagtcagctggaaaacgggtgggagcccaccatggtgctgctggagcaggctgtggctgaaggggtcatgcgtccggtatccctgccggtgctgcggcagatgatcaccgcgtccatcgagagttttctggcagaccgcagtctggcagaaagcggggtgcaatatgtggctgtactggaagaaatgatctcgattttactggaaggagtgctgccgcgatgaaacacagtttttgcgatggatgggagtttacacgacactggacagaagcctttggcaaggggctgccggtgccaaaacaggaagtcgtccgcctgccccatacctgccgggaggtgccgctgcattatgcatcccctgctgattacgagatggtctgcggctaccgcaagcggttccgggtgccgccggtacaggctgcgccccggctgtttgtccgctttgacggcgctgctcatcaggcagtggtgcgggtcaacggcagggttgccgggcagcatcggggcggctataccggctttgcggtggagatcaccgatcttgttgaccgggaaggcgaaaacctgctcaccgtgcagctggacaccagggaagacccggctatcccgccctttggctttgtcatcgactacctgacctacggcgggctgtaccgggaggtctggctggaggctgcggcagaaagccgcctgaccgacctgttcgtctacacgcccaccctgcatgacgccgtggtgcagtggacggcagagcttgcgcccgcagccgtggcggtccgcatccggctggagaccgcagacggtaccctgctggcagagcagaccgcacaggcggcagaaaccgggaagatgcagctttctgtgccggacgcacagccgtgggatacagagcacccggttttgcatcatgccattgcagagcttttgaatgcagccggacagaccatcgaccgcaaacaggtgacgtttggtttccgcacggcagagttccgggcggacggcttctacctcaacggaaaaaagacctttctgcgcggcttgaaccggcaccagagctacccttacatcggctacgccgcaccggaaagcctgcagcgggaggatgcccgcattttgcaagaggagctgcactgcaccgccgtgcgcaccagccactacccccaaagccaatattttctggatgagtgcgatcggcggggtctgctggtgttcactgaactgccgggctggcagcacatcggggacgacaactggaaggacgccgcctgtgaaatgctgcgggagatgctcctgcaaaaccgcagtcatcccagcatcatcctgtggggtgtgcgcatcaacgaaagcgtggatgacgatgccttctacacccgcaccaacaaaattgcccatcagctggaccccagccgtgccacttctggcgtgcggtatctggaaaagagccatctgctggaggacgtctacgcctacaacgatttttcccacaacggcgtaacgcccggcgctaagcccaaaaaggacctgaccccggatatgggcaaggcgctgctcatatcggaatgcaatggtcatatgtaccccaccaaagcctttgacgatggcccacaccggcaggagcacgccctgcggcacgtccgggtgcagaatgccgcttacggcagcggggaacacgccgggtgttttggctggtgtatgttcgactaccagactcacaaggatttcggctctggcgaccgcatctgctaccacggcgtgctggacagcttccgtaaccccaaatttgcggcggcggtctatgccagtcagggtgatgctgacccggttctggtggtcagttcctccatggacatcggcgataaccccgccgggcagctgggcacggcctacgttttcagcaatgcccagcaggtcaagttgtacaaaaacgatgtgttcgttaccgccctgcgccaaagcgagtggacagcactgccgcatccgccctttgtgatggacgataccatcggtgagctgctggaaacgcaggagcacttttccccctccaaggcagccgctgtgcgggactgcctgctggccgccggaaaatatggcttagcgggactgccgctggcttacaaggtcaaattcggctggtgtatgctgcgctacaaaatgagctttgaggatggcgtggcgctttacggcaaatatgtgggcaactggggcggcgaagccacccgctggcggttcgatgccgtgcaggacggcaacgtggtgcgcagcgtgaccctttgccccagtgcaaagctgcacttggaggtcaaggccagccggacgaccctgcgggagcaggacacctacgatatggccgctgtgcgggtacggattctggacgagaacggcattcccgccccctatgcacagttcccggtgcagtttgcggtggaggggagcgccgcccttgtcggcccgcagaccgccgtggcagagggcggcatgaccggtacttatctgcgcaccgtgggcactgccggagaagccctgctgaccgtttctgcaccgcagacccagcccgttgtgctgcggttcaccatcgaaaaggaggatgctgtatggaactgaccctgaaacagaaaaccgcattcggtattggtgccgtgggcaaggatatggtatatgccctgtcggcttcctacgtcatgtattattatcaggatgtgctggggctttcggccagctttgtgggcgttgttctcatggtagctcggttctttgatgccttcaatgacccctttatgggcgttctggtggcaaagacccgtacccgctgggggcgtttccgtccgtggatcttttccggcacgctgctcaatgcgctggtgctctacgccctgtttgccgccccggtgctggacgaagcagcgctgatggtctatttcagcgtggtgtacatcctgtggggcgtcacctacaccatgatggatattccttactggtccatgatccccgccgtgacccgcacgcccaaagaccgggagaatctttccatggtggggcgcacctgtgcaggcgttggctctgccctcatcgccatgttcaccatgctgctggtgggagcccttggcggcgacagcgagcgcgctggcttccgctgggtagcgctgatcgtagctgtaatttttgcagtgacagagctggtgtgctgcatttccatgaaagaaaccacccccagtgagatgaagactgccaccgtaaaggagatgttctccgccctgttccgcaacgatcaggctatggtagtggtgggcagcatcgtgctgatcaactcggcgctgtaccttacctccaacttcatcatctatttctttaaatatgaccttggcggtgcaggctggaaagccacctacaccctgttttccaccgtgggcggtgcagcgcagatccttggtatgatggtgctttaccccttgctgcgcaaaaagttcagcagtacgcaggtattccatctgagccttgtgctggcgctgtgcggctacggcacgctgctggcgttctgcctgactggcctttcccacagccttgccttgctgtgcattccgggcgtggtggtgttcgcctgcaacgggatgctgaccgtgctgacgaccctgttcctttccaacagtgtggattacggccagctcaagaccggacgccgggaggagagcgttatcttttccatgcagacctttgtggtcaaggcagcctccggcgtggcggtattcctgaccggtatcgggctggacctgatcggtcttgtgggtaacacagaggaaagcggcccggtggcggtacagagcgccggaacgctgctgggtctgcgcctgatgatgacggttctgcccatgctggtgctggcaggtgtgctggtgctgttccgcaacaagttcgttctgaccgatgcccgcgctgccgagatcagcgcacagctccatggggaggaaacgcaccatgactgaaacgctgcactggtacgcggaaacctccggcggcacacgaaagggcagctgcgcggtcacggagaatggcggtgtgctgcatctttctgcagacctgcccgccgggacgctgaaaacggtgcgtgccgagctgccgtggacgatggaagcagacgaacgtctgttcatgaacggctaccagacatggacctacagcccggagctgaaccggaacggcaagctgcgcggcaccgaccacattccgggatttctactgaagaaatatgcctttgaccgctacggcgattatcattttgtgccctatgggcatcataacggtcagagtcacggcttttcctactgctatttccgcaagggcaagcagttccggttggtggcatcgctggacgagaagcctggctacaccatcctccgctacgacagcagcaaagccctgctgacgctggagcgggactgcgccggggtggagcatcccggcggcagcgttgccctgttcgacctgttttttgccgagggcagcgagacggaggtgttcgacggctggtttcaggcgatgggcatacgccctcggacggagaaaaagctggcaggctattccagttggtacaaccgctatcaaaacatcaccgaggacaccatccgggaggacatgaccggctgccgcagcctgctttgcccgggagacctgttccagatcgacgatggctgggagccgaaggtgggggattggctggaaacggatacgcagaaattcccccacgggctgaaaggcatggtgcaggaaattcacgcttctggctttcaggctgggctatggcttgcaccctttgtgtgcgaaaaggactctgcccttttccggcagcacccggactggctgctgaaggtgaacggtgcgccatggtgctgcggcagcaactggagcagcttttatgcactggatatcgacaacccggcagtgctggactatctgcgccgggtgttcgaccgggtactgaacgactggggcttcgaccttgtcaagctggattttctgtacggcgctgccccctttggcaacgcccgcgagagccgggcgggcagaatgtaccgtgctatggagctgctgcgcagctggtgcgggcaaaagaccatcctcggctgcggtgtaccggtgatgcctgccttcgggctggtggattactgccgtgtcagctgtgacgtagggctggactggaacgatgtgtggtatatgcgcctgttccaccgggagcgggtgtccacaaaacaggccatcaacaacactgtattccggcggcaactcaatggccgcgcctacggcagcgacccggatgtgttctttctccgggaggaaaactgcaagctgacggcagaacaaaagcacacccttgccacgctcaatgccctgctgggcaatgtgttccttacctcggatatgccgtcccgctacacacaagcgcagcgggcagagtaccgccgcctgcgcaccctctttgagcgtgccacgcaagtgcaggtggaaatggaaaacggccgtctctatatccggtatctgctgggcggaacaccgcaaaaactttgtttcgacctgttttgacagtgcaaacaaaccacaatcaaacaacaacacccgcccatatactgtgctttgcacacgatacatgggcgggtgttttgctgttctgccagtatgatttctcagcttttcaaatgtagcttgggtctgcgcagcgccgccgaggtttcatacgtcctactgcttttcccgtgcttcaaaatgacaccggctctattataatggatggaaatgctgggaacaagatgaaagataccggtgtacaggatctgtccccggagagttgtaacaaaccatccggggacatttttgtttttcggtatcttttctgtaggaaaaaagcgtggcatactgaacaaaacaacttggaatttgtggaggaaaacccgatggaagaaaaaacgtatcgtacccgttgcggaacgatccactattgggcaagtgtgtcaaacctgaatcttttcaagtttgcggcggccaaaggcaatctttccgcagtagacgggatttttcagaatggcccgaatcaatgttgcgctgaaaaggggagaggtaccgttctgacgggcgagtttctgaaaaccatgggtctccagatatttggaaagaccatttgcacctgtgtccgtatttacatattgctcaaaaatcgtgcgtatggcaggggcttcatcttcgttgatttgcagcacaccgtcaaccaaacgatagccataaggcacaaagccgccgttccagcggccttctcgcgccttgtccactgcctgcttgtgggtcacactgccatttccaacaagaaggcgctcaccgctcatggttaaaatgcggtcaaggtggtttgcccaatcctgcatggtcatgggctgttcgcgttctgcctgacgttctgcgaaatccagataaccggaaaccaactgccccatagcacgaagctctttctcgttcagataatttttggcaatagtagcttctcgtaaagtgggctggtttcctgcaaaagtggtcagacccataaattccttttcggcatctgcacggttgtaaatgacctcggcggcagtctgaccgtggatggcataatgaattttattctgaacttttttgaagaactggacggagatttctgcttttgggtcgtagtcaatgctggttgcatagatttccagaacctgacggtagaacaccttttcagaagcacggatgtcgcggatgcgttccaacagctctttgaaatatccaccgccgcccaaatttttcaggcgttcatcatccagcgcaaatcccttgcgcatatattctttcaaaatgccagttgcccagatacggaattgtgtgcctcgtttggatttgacgcggtaaccaacggaaatgataacatcaagattatagtaatccacgtcgtatgtttttccatcagcggcagtgtaggcaaattttgcccacactgattccttttggaattcaccttctttgaaaatgtttcgaatgtgttttccgataacgctgcggtcacgttggaacaaatcggccatctggtcaatggaaagccagacagtgtcaccatcaaaggtagtatcgattttggtcaggccgtcttccgtggtgtaaatgaggatggaatttttaggagagttgcctggtcgattcgttttaagcaccccgttccgtgtatgtaatacagtggaaggggagaccttgccactgtgttgggacaaatattacaagaaaattatatcatgctgcaagagcagtatcaacagtatcttgtcgattttggttggttgttgaggatacggcgttgtctatttccaaggccgatgcgtacttctcgatcacgtcggctagaaaggttgcgaatgcgctccattcatcgagtgtgggcgtagagcattccgaagaggtgggattgttttctgtacggtggcaattattcaatgggcatctccatttccttgtagcagaacttaggacgtcctgcggatttttttggaaatgttttttgattcatccgattaaactttttaagcgttccattttttcctgcgctgtttctttccggaaactgaccccaatgcaggaaacaggaacgcacatttccaacaggcggtcatagatgcgggcatgagcggtatcctgtggatgccgttctctctgcatggattttctacccccttccggctcgctcttgcaaggttatcgctgggtatcccgtgcagacagtcatgtgattttcaaagttcgatgatggcttgtagaaagcatatcacaatgaagcagaaattttcaggaagcattccttctgcttttgaccttcaaaaccggaagtaataattccggtttgatgtgatattgaatgaagcaacgccgatttttccaaaacaaatttttctcaaaaaattgcttattcagcgtttgttaagatacgcagtcggcacagtttatgtgctgaatatcgggttttggcgaagcccaacaatcgtttttgaagtcggatttgtaaaatcagattcaaaaatcgtgagttggtaccaactcgccctgcttgctgtggatgcaaacgcaaaaaactcctgagaaaaagtaaccgtccgcttcaagttgaacttgaaaacggacggtctgatttgcaaaatgattttcaaatttgggaagcacgttgagaggcttcatagttgttgcaagcaatgcagacgtatatacatctgcgaacttgtcggggcgaggcccctccatctgctgtcgcagaccgttctgtcgcttaaaagccccactggggctttcattgctgcgctacgctccgcaaacgcgaattttgctctgcaaaatacttgttgggagcacccaaacccttgaactgcatccggtggatgcaggctgttttaagcaaacaaaaaggaaaactgttttacttcttgcggaattccccatacagccactctgccagagctgacataatagccttgtacttgctggtgtcctcaaacagagaagagaaggtgtcctgcgcttcaagatagctgtcctgtgcggcagtatcaaaagctttggggaagatgctctcggtgaagatctgcgggtcggagctgcgcgccagctttgccagtttcgggtcggccagcagacggtcatgcagggcagtaagcagcacccggtcggcgttggtgaactcgcccttgaacttctcgttgatcttcagaatgatctcgtccagcggctccttggggtcgtggccgagagcacccttctgggtgaccggctcgtagacgcctttggcgtgttccagctcgatggcaccggcaaaggtcttttgcagcttgtaatactccagctgcaatttgccctccagatccagcggagagacttcgtccggcggcagcagcttgagcaggtaggcacagaatacgttctccttgtgcagctcttcatcgaacatccgcgccacctgtgaaacgtagccgtaccacttgacaaggctgcgcagcaagcggcggaactggtaccgctcggcctgcgttttctggttatagcggtctgccaccggcttcaagacgctgctcatgcggcccacggcgtttttatcctgcttggtgctgcggaaatactccttggcaaaggcttccacgtctgcatcggaataaacggcaaagctccgcagatccttctgggtcttgtaaatgaggtcggtgttgacctcctgctccagaaaggtttcctgataaaacggctggaaggcctcccggatgtcctctgccttgttcacaaaatccagcacaaaggtgtcggttttgccgggacaggtacggttcaggcgggagagggtctgcaccgccttgacgcccttcaactttttgtccacgatcatggtgtggagcagcggttcgtcaaaaccggtctggtatttttcagccacgatcagcacattgaagttgttgtggaactcctttttggtctggctctccgcaatgtggctgccgtcggtgcggacgttcagggactgctccgtgtactccacgccgccgtccggtacggcaccggaaaatgccgctaagatctgcacatcgtcataaccctgctcggcaatgtagcgcttgacctcgtggaagtaccgcaccgctgccaatcgggaggaggtgactaccatcatcttgcctcgcccgccgatcttgtggctggtggtctcccggaaggtctctacaatgatctttgccttctggctgatgttgtagggatgcagttcctcgtacttgcggataagctttgccgcccggctggcgggcaggtcggggttgtccgggatggtcttggcgatcttgaagcaggtggaataggtcatgtagttttgcagcacatccagaatgaacccttcctcaatagcctgccgcatactgtaaatgtggaaagggtggtggctgccgtccgggtactcggtgccgaacagttccagcgtggcggcttttggggtggcggtaaaggcaaagaaggacaggttcttgtgccgcccgtgggaggtcagttccttcaccagtgcatcctccgggtcgatctcgtcctccgctttgccctccaactcggcatattcccgcagcgcatcctcggtgtcggcaagggcggctttcagcttcaaagcagaggtgccggtctgggaagagtgcgcttcgtcaatgataacggcatagttcttcccagcggtcttgttcacctcggtgtagatgaccgggaacttttgcagcgtggtgatgatgatgcgtgcgccgttgttgatggcatcccgaaggtcgccggagtttttgtcctcgccgatggcctctaccgcacccagcgtatggtcaaaaccggagatggtctcctgcagctgtgcgtccagcacggtgcggtcagtcaccacgatgacgctggcaaacaccggcttgttctcggtgttgaacagggaagccagtcggtacgccgtccatgcaatggagttggacttgcccgacccggcgctgtgctggatgagatagtgctgcccggcacctttctgccgcacatctgccaccagtttgcgtaccacgtccagctgatgataccggggaaagatcagggtcttgccgtcctgcaggctcataaacttttgcagaatgtccatcatgctgtccttctggaacacttcttcccagaggtaggcggtaaggtagccgctggggttgggcggattgcctgcgccgccgtcccgcccggcaccgttagagccctgattgaagggcagaaagcgggtgtccttacccgccagccgggtggccatccacacctcggtcaggtctacgcaaaagtagcccagaatgcgcttattgaactggaaacacacctcccgggggtcccggtcgtgcatccactgctgcttggcgttctccacggtctgcccggtgaactggttcttcagctcaaaggcgaacaccgggatgccgtttaccgccagcaccatgtccaccgagttgtgggtggtgtcggagtagaaccactgccggttgcaggtgatctcgttttgagcgtagcgctgggcatccttctggttcagcgcggactccggctgaaaatagcacacccggaaccgccgtccccggtgcttgaacccataccgcagcaccgaaagcagtccgtccgcatcgcaggcattgttaaaggccgtgcagaacttccgcacagggtttaccgggttctgcttttcaaaaaatgcccactcgttgggctgggtcttttgcacaaagcgaatcagggtatccacaaacagccccagcttggggtcgtagcaatccccgttgcgggtgtagcccccggcaggggagagcagcgccgccgcaatgtccgattcaaactgcttttcggtggtattgaggggcatggttagacctccttataattcatttcattgacgagtagtggagtggatatttttcatctgaagagcagacttcttccatggaaaggtctgcaataaaatcttcgatatcgtaccatgtcatatctggatggaaacctttatcaccatacatagggacatttagcatcttcatagcaaaaaagcattcacagcttcttctgggaaactttccaaggtaggaatcaaaaaagttgttagttacagtatagtgtgacttgtaaataaagtttttccatcgttgatagacttcttcataattcagtaaatcaattaccgaaatttcctcaaattgacgagaatttaaatttccccatgcttttttcaataatgaaacagcggcagcatcacttgacggagcactgtacccaaagatagtaaacatgaatgactcatttagagcgtcattaacagctttccaactttctttaatgaatggatcgctagaatagttcttttcttttacaggatatagtagtttggttggtacaaacggtttatggcacttagggcattcggcgtcacatgcaccatattcgatatcttctttacaatagccaatatcggtattgccgtgtaagcagagaatgtgcggaagatttgtagagaatctatatgaataacatcttttgtatgcttgaattaaaagaggatcccaattaaatgtggcaatcacatcttttccggttaagcttaaaatgagatagtcatatactgtaggagaatctggaagttcaagagatgcgaaataatcatagagtgatttctcaattacttggacgacgtctttacattctggtcttgaagcaagctccgaataaatatcttcgagatttttactggttgagtgtaagctgacatcttttagaatgtagtccattccaagctcagaaaataaattattcataacagaagattttttgccgtttttatcaccatgtggaatggctgccattgtggcaccggcaccaagcaaaacagtgtgacgttttatcatttctgcatatcctcctttgtgtccattttacacctcccttttccccgttacaacctcataaatcaaacttttcttgtagctttccagttcttttaccagctgctccttctttgcaatcagtttgtcaatctcggcgcacttggcgtcaaggtagtcggcaatttctttttgctcttcaagtggtggcaacaaaacaggcatggatttaagaaggctctgcccaagactagcccgtgttacaagattcatttccttaacaagataaaaccgtaagtgagtgcttctaaaataatactttgcatacggcgtatgcaatttgtctgaaaatggacgtactcggatgagaaaaccagcaaacgtggcattgggaatatccttttcacaaacacaagaaaatccaacttcttcgatcgtttcggaagtccgggtaaagaaaatgtctccctcctttacagagtatcgctcttgttcttctggagtggactcgactaatccagatacggcaaaaggcagagagtaatttttataaacatcactataacttacaaatggaaaaccttttccaaaaaattcgctgctcttacttataccgttctgcgtatctccaacattgcggagtttaccaagaacccacttagctggaatttgaccaatatagtcaatcccactatccttcatctcccgctcaccacgcacgcctttggtaaccgactgcgtaataactgcctgcttgagctttttgtattcctcgatgctggaacgagttttggagagcagattatcaattttagaacattttgattcaagataacagacgatgagtttttgttcattaagattgggaacaggaacaaactcgtctgcgagcatggaagataaatcaaggttttggatgccggttgtttgcttaatatagttctgtgtataacgatttttgtagaatgtaacaaatacatactgaagatattgaggaagaataaagtcggaacaacgcaaccgatccataaaatttgcaaaaagtgcaggatactctttgtcaaatagtacagtccgcccaacgggcgtcttttcaccgccgcctgatttttctatgagaatgtcatttttctgtaaaagaagcttctttataatgggtgatgcataatgccggaccgttaagttattggaatcagtaaaacgaaaatgctcataatcaaaatcggcgattcgcaaacaaatgcagtcgcccgtttcgccggtggcctcatcgccccaagcaccaccgtctctttgtgagatacaggatttcatgcgatgaacctcccacccctccggaatctccccaatccattcaatgccgctgtctttcattttccgtcccatggtcagccctccttatggaacagctctgccagcccggcggagatatcctgttccagtgcggtgatgcgcgccacgatatcctccacggcttccggtgcctgatactcgtagaaatagcgggtcatggggatttcgtagcccaccttggttttgctgtggtcgatccatgcgtcgggggcgtagggcaggacttcccgggcaaagtaggcgtcaatgtcctgcaccagcggcacgttttcggtgtcccgcaggctggtgtccggcacaggcttgccacgcttcaggatgatactgcccgcctcgtcccgctgggggcgttccaccacgatcttgttgtagccgaactccacgctctcgaacaccttgctctcgcagtagatgccgtttttgtcgccgtacaccttgccgttggcaaactcgccgtaggcggtgacgatcagctcccggcaggcatcggtaatgtcgttgcgcttggtgccgatgctcttgcggcggggctcaaagcagtggctggcgtcaataagctgcaccttgcccgcgcggtgggcgggcttatccttgctgagcacccagatgtaggtggagatgccggtgttcatgaacatatcggtggaaagctgaatgatgcagtccagccagtcgttttccagaatatactgccggatgttgctgggtccgctgccggcatcgccgctgaacaggggagagccgttctggataatggccatcttgcctttgtttgccagcttggcaaggccgctcagcacaaaaagctgctgaccatcgctgatcttgggcagaccgggcgcaaaacgccccatctcgccccgggcagcctcggcttccaccgccttctgctctcgcttccagtcaatgccgaagggcgggttggagatgatgtactggaaggtgaatccggggaactgatcctccgacagagtgtcaccgaaccgcatattgttagggtcgccgccgcggatcatcatgtccgccttggcgatggcaaaggtggaggggttgaactcctgcccgaagcaggtcacctcaatgtcgctgttcagctcgtggatgcgctcttccatgcagctgagcatctggctggttcccatggccatatcgtaaacggtcatgctgctggtgtcaaggtcggcttcggacagcagcaggtcggtcatcaggtagatgatatcccggctggtgaagtgggctccggcttcctcgccaaagctctcggagaaccgccgcaccaggtcctcaaagatgtagccgcagtccacggcgctgatcttgtccgggccgagatagcccttctcggagccgaactccttgataacgaggtagagggtgttgctctctaccatccgcttgatgatgttgtcaaagtcgaactttgccagcacatcctgtgcgttggcagaaaagccggacaggtaatcccggaagttggattcaatgttgtccgggtcagccagcagggtctcgaaggtgaaccggctggtgttatagaactggtaaccggaggccttctgcaaaaagccgtcgatgacctgcagctttttcaccttttcgtaggtgtccagcactgcctgatgggtgggcagcagacagtcgtggaaccgcttcaccacggtcataggcagaatgaccagaccgtactcgtggggcttgaacggcccccgcagcatatcggctacattccagatcatggcggctttttcggcaatgttggcacctacggcggtgatcttatcgtttggcatatgttgctccttgtttttgtgataggtggacatcctgattttacaacgatgggtgtcccataaagtggacggaagattgcttttcctgaaaaatgattcttgcatctattgtaccacgataaaagtggaaacaccatattccggaaaaagaaaatgcccgcctgaaaatcagacgggcatacagtaaatcaaatcatctgaaaatgctccaatgcttccacaattgcatcttctttctccttcgggcactggggctgcttcgtattttcggacttcgccttgtggtggttctctcgtacctccagaccgcatttctgcttgacctgcgagatatacagggaagatactttcagcccggtctgttccaacacacgggccttgatttcgggataggtcgcacctttctgcaatccggaggtgtccatgccctccaaagagaactctacacgtacttttttggagtcgatctcgcccttggaaagtgcgattacacattcgcaatgtggtgttgctatgataggaatacattgactttgcctcgtcggttgtatgggaacacaaaccggcgttctgttttgccgtcttactattctttctcggtggcttaaagtttgttccgtccaaactatttttgaatccagtcttataaataaatgtcagcatggacgggtctttgttaccatcttcatcataccctccgacaataactttttcaactatactttcaaagacatagcgatcaaaggtgtccagcacttcgttttcttccagcgtcttgcgaaactctgcaattcgctttttcatagtgctttccgtttcggcggattcttgcaaatcctcccgttgtttttgaagctgttcaatctggctgcttaaatcaaaatatttctgttcgtaagtatctttgtcaatgatttcttccagccgcatatcaaccagcttgtcccgtttcgcatccaatgcagcaatgtctttttctactttggctaactgtttgcctgcattaccgtccgaaagtgtttcttctgtccgggcaataaattcgtctaacacatctttgttattttggcacagaagccggtaggattcgataaatgcctgttcaatggtttcctcggcaattcctttactgtcgggacaaaacttcttgccttttttggtggcggtcacacattgccagataaccttattgtactgtgaaccgctatgccagctccgccttgtaagtgtgcttccgcagaagccacattccagcatacagctaaaggcatatttccggctgaatttttcacgctttccatccgtacctaagcgacgcggctttgcgcggcgcttcaaaatctcctgtgccttttcaaacatttcttctgaaatgatggcctcatggtgatctcggatatagaactgatcttcttcaccgaaattatccaaacggcgtttagagatagggtcaagcgtaaatgttttccccatcaaaatatcgcctttgtatttttcgttcttaattatgccaattaccgttgtttcggcccatcgggtgctgccgcgttttgtcttataccctaagtgttcaagctcttgcgaaattacagaacctccggctccctcgatatagcgccggaagatatatcgcacgatttcggcttcttcttcgttgattgtaatgctcttatcctctggatgatagtcatatcctaaacatccttggaacccaaccaactcaccacgctgcattttcatttttaagccctttttaacatttgcagaaatattctcaacttcctgctgtgcaacagagcttaaaataacaagaagcaattcaccgtccatcgttaaagtatttatattttcttcctcaaagaaaacggcaatccctttttctttcagcatacgaacatacttcaatgtgtccagtgtatttcttgcaaaacgggaaatggattttgtgattatcatatcgacatcaccattcatgcagtcgttaatcaaacgctgaaaatcttcccgctttgtcacctgtgtacctgtaatcgcttcatcggcgtagataccagctaagtcccattcaggtttgcttttaatcaaatccgtataatgctgaacctgtgatttgtaactgttgagctgatcttcactatcggtacttactcgacaataagcagcaactcgcaggcgctttgctaaattagctctcgatctggacgaaagcacatttcgcgccttaataatttctacatctttcatggcggccctccttttgtgttcctatcatagtgttattataacacaagaaaagccacaattcaagataatagatcagaaacgattttatagtctttcataagacgatttttgattagggaatattctctatcagaaatcagcttcttttccaaaagctgcttgagaaaagcaagttgcatactatatcgaatcaagttgtcttttttcaaagaaaattccccctttccataacaaagaaaaggggcaaaacggacggctgctggcacagctccacgggaatctcacccccgcgtggttctcacgcggccctgctcgttgcctgcgacgcttcaaacgctcggactacgacggcaagggcgtatcattgtcctgcctgcgcgtcgtcgcccgcaggctgccacacctgctttacggcccggtaaaatcgctccgcttatcccaatgagggaaagcctcttggcgcacctgccgcccggctcggcacagacagaatgtatccgtctgccctatgacgcgccgccattgtcctgcgggcgtatttgtcaaggagcaaaggggccgccgggaaaacaggcaggcggggaaagggaaagccgcctgtctatggccggggccttaaccgtcagtcgccaatgggactaacgatggaatggatcagcttgatttgcaatcggcgcttcatatactcgtcaatgcagatatgaggctggccgctgccgtcatagagcgtccgggtacacagcttattgatatagccatcataatgctgcaagacacgctccacggcttcggcgttaccggcgcaggccgcgtcgatcacaaaatcaggcagagggcttttgcccttgtaactggattgcttcatccgcgtttaacctccctccggcatgaacgccatcaattttatacgcaagtctttcagggtgcttgtcctgtggcgctgtactgcgctgcgggacattcccatcaggcggccgatttcttcgtcagtcaaatccagaacaaagcggagaatcaaaatactctgctcgtcttttggcaggctggcaaacgcttcggccacaagctcgttgtcgatatgtaggtcataaccatgcgaactgaatgtaaagctgtcgcaggaataccgatctacggtcgagagcttgtcccaatcagccggggaaacggcgtccagcgacacttcacggtcgcggcggcacttcatttcccgcagataatctatcgcctcatggtacagaaccagcttgcagtagcggtcaaactggccccattcaccgtatttgcgggggattgcttccatcttctcaccccctttctgtgggggatgtggtggttctctccctttccgccaatagagcgaatggaatctctctggctgcccgctaaacgcctccttttttcacttttttgaaatttctttttgcgccggatagcagaccgcaggaaataacaaaattcgcccggcaggtcaaagacccgctgggcgaaacaaaaagcaatatgttcttttcctacatggtatagtacatactcgcagccgcttgtccccgctgccgggggacggctttttttgacaggctaacccctgtcagaatttgtcgaagcggttttcgttgcatggcggctccctcctaaagccgccatgccagaacacggtgcaggggtcgtcgaagcaaaaagaaacggcggccttgatgtattcaaagccgccgtaagattgaatttgtggcatagtaattgtctgctgaacgacggctttttttcttttgccgtcgtccggcaggttttcgctatctgaaataagtttgctgttataattagtttcctttaggttaaattctggctgctactgttaggtaaataaagaagctgaaaaacgcaacatacagagaactaagcgttaatgccgctttagatgtggccgtccgtgtccttttgtttttcaccagccagattgcgaatacaaagcccgcaataatcaaaagcgcgtacactgcaaagatgatataaacccacggcgcttccatgccgattttcaagtgccggatgataaacagggtcaatgggagtacgcttaccaacaaagataatcttcctaaattttctgctttcattttttctcctttatccggctacaacatctgcctttttcagatgattagtagccaaaatcacaaataataccgtgtaaacaagaaccattggaaccaaagtcattatgctgtcaatgggcaacacttcgtcctgtgacgatagaccgagaataatttgcgaataagggaacatctcacttaaaccagcaatatggaaagccagaccgccgatactaaggcaaaccgccaaacctaccggcaccgcaaagctcctgatccgcatggacaagtaaagctgaacagcaccaacgcttaaagctgaaaaccagcccataaacagccaccatagcatattgatagggatgggctgttcaaaccgaaacacaacctttcctacgataatgataaacaccatcaaaagaacctgtgcggtcagaatagattttgtcagcacaaccagcttcgcaatgaaaatggttggccgggaaaccggcgttgtcataaggctgttccagttgtgatttgtgtgttccagccgccacaaataggacgcacaaatggcaatcaggattggaaagaaaaaatacccatagaacagccctgtttgaagccaaagctgctgccatactgcgccgtcgtacaaattggccgaagcattgatgccataaatgattgcaccaatggcggcggtcaaaagtggcagaatgagaactgctacccacatattagaatggcggcttttcagattttccgcccgaattgcattgataagcattacaatccctcctttaatactcgtatttttgaaacttcttctcaaacaggacaaaggcaatcaatccaacaataaagaggatcgtaagcggaagaaagtcaatattccgaacgacaagttcactggattgcaaattgccggaagaagtgtcctgccccagcaccatcatttctgcgtaatttccccaaatgaggatattgcggatgcctgtggggagcaaagtagaaataaagccaatcaacgcgccaatcataccaatagacatcgggacaagctggttcgcaaaaacaagagagaaaaacacctgaatagttacaaccacaaatgtaaccattactgtccccaaaacaaattcccacagcgtttttaccggcagcggctcaacaatccccacagcattaccgtaggcgacaatcacaagagcctgaatgagaattgccgccagcatgagaacggctactacggtaaacttgcagaaccaaattgccttgcggttttcattgttgcactccaacagcttccatgtatttccccggtgttccatatcgcaaatgcggctggcaataaccgctgacagaatgggaagaaaaagcccattcatagtagctggcccaacgatcaaatcctcccatgccggtgcattggggtcggaaatcataccgaggaaattttcattgtttccatagttggaaaatacaaagagcaattccacaccgaggatcagcacaaaggtcagaaaaacctttctgcgtttcagtttgtataattcaaggcacaggtatttcatcacagtgtcagctcctttcctgtcaggttgaggaaaatatcttccagactttcccggtgttcctcaacacgataaacagagataccattggaacacaggcattgcacaacagcgccggtctgttcgtcagtcagcgcaccgatctgcaaaccatccgttgtacgctgcgggttggcctttttaagaagctggaaagcgtggttgttatcgctggttctcaatataatctgtggctcccgctgcatatccagaactgacatcctttcctgaaaaatcaggcagccctgattgataatgccgacaacagtagccatctgatcgatctcacttaaaatgtggctggaaatcatcactgtcatgccatactgtttcggcagcatcttaatgagttcccgcatttcttcgatgcctgcggggtcaagcccgttggtcggttcatccaaaatcagaagtttcgggaaccgggccagtgccattgcaatgccgagccgctgcttcataccgagagaatagtttttgactttcttctccatctggttttccatacggacaatatgcaccgcttcttcaatgttctttttgggcaagtcaagcagcctgcgaatgatctccatattctcgcggccagtcaaatgtccatagtaggacggggattcaatcagggaaccaacggacgcgagaatatcacggcggttcttttcgttgaacggttttcccataatttcaatggttccgctggtgggtttgacaagtccgagcagcattttcatggtggtggacttgcctgccccattcgggccgagaaagccgtaaatgtcgccctctttaatccgaatatctaattcctgaacacggtaaacaccgtcatattcttttgacaaattatctgttgctacaatcattttttcttgctcctttcctaagctgcttatatcatatagcccccaccttgcattgcattggagagaaccttgattttaccttgattttcacgatcaaagctgcaaatatgaaaagatatggtataatacataaggaaaggagtgagccgatgggtacaatcaaggacaaaattattttgctggttgatgatgaaccggcaattttacagatgtgccaatccattctgaaagagaatggttttgaaaatatagtaaccgccaataccgccctgagcgcattggaaagaatgagtgcaaagccggatatggctgttttggatgttatgctaccggatatggacggctttatgttggcaaagacaatccgagaacagaacccgatccctattctttttttgacggcaaaaggagaaatcgacgataaatcaaaaggttttgaggccggtgcggatgattacatggtaaaaccatttatcgcgcaggaatttgtatggcgcattacggccattctgcggcgaacctataaagaaagtgaggaaagcagcttcttactggatgcctgcaaagtggacttagaacaggcagaagtctatcgtgagggacaggaaccagtttccctgaccgcaaaagaagtggagatattgaaaaaactgtatgcaaatgcgggccgcattgtaactttgggtgcgctttgccaaacggtttgcggggatatttatataggctatgagaaaacacttatgtcgcacattcgccatatccgggaaaagattgaggaaaaaccatcttcgccggtttcgctggtaacggtaaaaggcattggatataagttgatcttaaaggacaagtcaaggtgagcctatgaataatattcaacgattttttaagcggtatgttcattccagtgtgaagctgttctgcttctttatcctgataaacattgtcctttttgttgtgctggctgtggtgtcaagcagtcggggcagccatagcccaacgcaactattagagcaggtttccgcagacttgcagcaaagtgaagaaagctaccgtctttcagaaaatacggctatccaaatgacaaatgaaaacgcatggtgtatgctgataagcaatgacaccggcgatgtggtctggaattacaaaataccgtccgaattacctctgcactatacaccgggcgatattgcagaaatgacaaggtggtacttagaggattatccagtattcgtgtcaaatcaatcttatggtctgctggttgtcggctacccgcaggatagtttttggaaactgtctgcttacaaaacttctgacagcattaaaatagacatatttggattggttactttatttttgttcaatatcatcattgtgctgatcctgttcattcacaataaccgcaagattgaaaaatccattaagccgatcctcaccggcatagaagaaatttcatctgggaagaaaacacagttagttgaacggggggaattggcggaaatcaacgcaaagctgaataaggtcgccaaaaccctgcaacgcagggacagggcaagggcaaactggatcagcggtatttcacatgacatccgcacacctctatcaatggtgcttggctattccagcagcttagaggaaagccgggatttgaacacagaacagaaagaaaagattgtggcaatccgccagcaggctaccaaaattaagcagctcattgaggatttgaatttgacttcaaaactggaatatgatatgcagccattacgaactgagaaaatttccccagtagaattggcccggcaagtggtatgtgattttctggatagtgggcttgatgaaagcttctctattgattttcaatcggatgaagaaagcgagctgcactatatgctgggtgatgaagcgctcttaaagcgggcgattacaaatcttcttcaaaatagcatcggccacaatccaaacggctgtgcaataacaatctcggttgactgtacggatggacatacagaaattattgttgcggataatggcgtgggggtatctgctgataagttgcaagaattgaatgccaaaacgcactatcttgaaagcacagatgaaaaactaaacctccgtcatggacttggtgtattgttggtacggcaaattgtagaagcacatagtggtacaatgaaaattgaaagtgcgctgaaccgcggctataaaacaactcttatttttgacattggtataggctgaaaagaaacggtaaagacacttcatttctacacatttaagctgccgaaaagcccatcatttcaaggcttttccatcatgggtggcgggcagataggatagattatctaattcccgccaaaacaagcttctaaatgcgtaggaaagcccataagaaagcgccggatgcggcggcctgctggccctgcgtccggcgttttctcatatccaaatatgaattataaagtttaatcttactgcatatggcaacattccattgagaaaatatgaaatatacaatgtagatgggtggtgctatatggcaaatatcaaagattgtcccggctttgaaactttcggcgcagatgtaaaagaggcgcggaaagtcaagcagttatcgcgtaagacgctggcggaacaggtcaatatcgactggcgctatcttgccaacatcgaaaatgacggcacaattcccagcctgccggttatcatacagcttatcaaaatctgcgggcttcccgtggaacagtattttaacccggaggtcatgcgggaggaaagcgcactgcggcagcgggtcagccacaagctgaaactctgcccggaagaatttctgccgatcatcgagggcgcgattgacggggccattcaaattcaacagaagaatgacgaaacggagggtgcatgacaaccctctgttttgcttttgggaggacgcaaactgcgccctctctttttttgtgcggttttcggaaaaaccgggattttgcgggtatttccttggggtcagaacgctttttaggggaagaagaacaaagacagcaagcatagggagtgtagccacactcccggcaaatggcttcccgtttgtatcttggggaaatccccaaacccctgaatgaatggaggtgagaaagtggcaaaccgaaaacggaagtttgtgctgcgcgtcccggtgacgccggaggaacgggcgctgatccagcagaagatggcccagcttggcacaaagaacttttctgcctatgcccggaaaatgctgatcgacggctatatcgtccatatcgacaccggccccgtccgggcgcagaccgcagagctgcaaaagatcggcgtcaacatcaaccagattgcaaggcgtatcaacagtaccgggactgtgtacgcgcaggacttggaggacatcaagggggcgctggcacagatatggcagttacaaagatccatcctatcaagtcaacgctgaaaaaggcgctggactacatcgagaacccggacaagaccgatgaaaagctgttcgtttcttcctatggctgttcctatgaaacggcggatattgaatttcaaatgctgttagatcaggcgtaccaaaagggcaacaatctggcccaccacctgatacaagcctttgaaccgggggaaaccacagcggagcaggcccatgagatcgggcggcagcttgccgatgaagtgctgcaaggcaaatacccctatgtgattaccacccacattgacaagggccacctgcataaccacatcattttctgcgccgtggatatggcgaatcagcgcaagtacatttccaaccgccagagctacgcctttatccggcgcaccagcgaccggctgtgcaaggaacacggcctgtctgtggtaaagcccggcaaagacaagggcaagacctacgccgagtgggacgcacagaaaaagggcaagagctggaaagcaaaactgaaaatcgccatcgacgcggccattccgcaggccaaagactttgatagttttctgcggctcatggaggcgcagggctatgaagtcaaacagggcaagtttatttcatttcgcgcgctggcagacggcctccgtcccggacaggaacgcttcacccgctgcaagaccttgggggaggattacaccgaggaacggatcaaccagcggatcaagagcattgccattgaccgggggccgcgcagaagaagcgccggggaaatctccctgcggatcgccttggaggacagtatcaaggcccggcagtcggcgggctatgtgcggtgggcgaagctgcacaacttgaagcaggccgccaattccttaaacttcatcacggaacaccagatcgacagctatgagggcttggaaagcaggctggctgagatcagcgcggcaaacgacgcggcggcctccgccctgaaagacgcggaacgacgccttggggatatggcgctgctgataaaaaacctctccgcctacaagcagctccggcctgtggcgctggaactgcgaaacgccaaagacaaggccgcgttccggcggcagcatgaaagccaactgatcttgtatgaggcggcggcaaaggcgctcaaagaggccggggttacaaagctccccaacctgtacgtcctcaaaaccgagtataaaaagctggacgcagaacgggaacggctgtccgcacagtacagcgaagcgaaacagaaattgaaagaatacggcattgtcaaacagaatgtagacagcattttgcggacagcgccgggaaaggagcatatgcaggaacgatgaacataccgagaatgagttacccccaataccgcaaggcccgcaggctcacccatgagtgctgcaactactgtaacggaaactgcctcctgctggacaatggggaggaatgtgtctgtgtgcagagtatttcctattcgctgctgtgccggtggttcaaggtggccgtcctgccgctggacgcggccctgtgcgccgagatcaccaaaggccgggacgaaatcaaacgctgcgccgtctgcggggcggcgtttacgcccaactccaaccgggccaaatactgcccggattgcgcggtgcaggtacgccggaagaaagaggcggaacgccagcggaaaagatacctcctgtctacgcatttagggcggtaaaagtccacggaaatcaagggtttttccgcatggtcggcaggcaggtggataaagttatcctgttcccctcaaaacggggttctaaatgcgggaaaatggacaaaaagaaatgccggacgcagaggctttgacacctccgcgcccggcgttttctcataggctgctctttaggatagtttagatcagcttgttttgcaatggatattgtagaagtatctaccaccccttttttctaactacttttttctttttaacaacagtcaatgtgctggggtctttctttttatttgcaagaataatcacagaaatcaagaaagtcaaaactattgtgatgaaagcagggaaaatgtgataagtataaccatattccgcaccacaagtatggtctactaaaatcatgcttgctttaatcggataataatttaacagtgttccttcaaaagttccgaaatatccatacacaaaagctagtgcaaccccacccaaaaaattatttgccgaacaacaaaatagcaaaataatcggcaagactgaaatatagatccctatattcgccccagtaacacgaataaacatattaaacagattgccaaaatgcgctcccggaaatccggcaataatgttaattactaatgctatcacacaacctataaggctaaagatgattgtcaacaacaatagaacaagtagttttccagaaagcaactgtttatatgggataggaattgtagatatattcttcatcgtatcgtctgtatattcccttgttataatataacctgctatcagtgcaatgataatcggaaaaaacaaggtacagttactaatcataacttgctgcataaaatagtcaaatgtccatgtctgtccaccgttggctgtggaataaaacagtgacagcagcggcgaaagcactgtcataataattccggcttttattacggaatagcgttttagttttaaaaattcagtttttattatatttcccatatcttttacctcgtccattttttataaaagcgaatgatcaaccacaacgaaagtgtaacagtaattgccagaataaaaattgtatggcaagtggttggtacaatcgcataggcttccggcaaaagattgtctttttgcaaatgatccatcattaagccgcttgtccagttcataacacatataactgggaaagaatttaagaaagcaatttttgcagcacttatagatgttccaactgtccctagtatgccccagttaaaaatagaataaaaaaacgcaagcaggatagaaagtaaaaaacttttgttaaaacaaataattaaaaatacaatcggcaaagaagctgctacgatgagaactccaaaaataaggctcataaatatcttataagtcataccataaaccattcctacatgaaacagtttacaaaacaacgcaacagataatgtgcttgtcagacaaaacgcaatgctaaaaataaagagcatggaaatttttgcaataatgagttgtgtatttgtaacaggaattgttctaaggtttttggaagtatcgcaatctctttctataaaaaacaaaatagcggcaatgataccaattagacatggaagcaaaaaaaccaatccatatcccaacatcattgtataaacataatcaaatcgggtttgaagataatgttccgttgtatctgcacctgttcccgcctttgccatatatgccaaaatcaacgggaaaaataacgataatgacatcaatgcgtataataatcttttccgctttaatttccaaaattcgcatttaatcagtttaagcaattccctcgcctcccgtcacacgcttgaagtaatcttcaagactttcttcacaggtgtgtgcctctgatacctccaatccgttttccacaaaggcagttacaattttcccaacaggcagatcaaggttgtgcaggcgcagattgtggtcgtcctgtatagagaaatggttttcacggaaattgctttccaaaattcttgccgcctgtgcagtatcggagagcgtaaaccggatatgcttactgcttttttgctccagttcagcaaggctttcttcttccagcaatgcaccgtggtcgataattccaatatcgtcagccagcaaggaaatctccgaaagaatgtgactggaaatcaaaatggtttttcctcttacgtcgcaaagctcccgaataaaggatcgtacttctgcaataccgatgggatcgagaccgttgatcggctcatccaaaattaaaagttccggatcgtgcataacagcaagggcgatggcaagccgctgcttcataccaagagaatactgtgaaaagagctttttatctttgtaaggcagtcctaccagatccagagcatcttcgatggtatgattgtttggtacgccccgcagggtagcaaagatacgcaggttctctgtgccggtcagatttggataaaagccgggggactcaatcagacttccaatacggggcaacaatttcttttcattcccctgcaagggatttccccagattttgacctccccggaagtcggcttcgttaagcccaacagcattttcatagtagtggtttttccggctccgtttctgcccagcagaccataaattctcccacgcttcacatggatatttaagtcagccacactcttttgtgatccgtattgcttcgtcagattttttgtttcaatgatgtaatttgtatccatattcaaaacctcctgttctgtaaggtattctatcacgccaaccttgcattaaccttgccgcaaccttgcattaaccttgcaatttgaaatccggcaaaatgacaaaggttcccgccataaagacgggaacccgcttaaatctctaaaggaaaaagcaacataaattcagttccttctcccggaaaactttcaactgttatgcttccacccatcttttctacaagctgatggacaatcgaaagaccaagaccgctgcctttttcagaccgacctttatcacacttataaagccgttcaaatatgtgtttcaaatcttctttctcaatccccactccattatccgccagtagcagttccatgttgttgtccttcttcgatagggcaaatttaattttgtccgcatggctgtgagcgattacattttgaatgagattattgatgatcctcatatagctgtccatatccaatcttacccggacaggctgttctggaatatcaatgtcataatcgacctgtttatcctcaaaaatcggtatccagtcgatcaggatatttcttgtcagctctgcggcctcaacgctctggatctccaaagcaaactcgtcggaatttaacttgaaccagtcaaagagcacatcaatatattctttcagatcgtgggctttccggcgggcggtttcaatataatcatcccgatctttccctgtaacaagccctttatgtgcagcgtcaagatacccgatgagggttgtaaggggtgtccgaacatcgtgggaaaggctcgtcataagctggcggttggtttcctctgtctgccggacaatcgaaagtctgctttcataggacacaacgatctcattgatttcataggcaagaggggatactagttcatttgttgcagacagaatacgccggttgccatttccgtttttcacatcaaccagtacatctatcatttctgctatttgtttttttacgcgccgaacgagaacgatggaagtcaatacagccacaacagcaatcacaatggacaagaaaacgatgatttccatgctggctacacctccttattaaaccggtagccaatccctttgaccgtttggatatactttggactggaagtattgacttccaattttttacgaagtcggctgataatcgccataatattactgtcatcatagaaatattcttcgccccatacttcctcataaatctgctgttttgtcaaaattttcccttgatgttttacacagtacaagagtagatcaaattcctttggtggaagttcaaaagtgccattttccgtagtaacagaacgattttcaaggtcaatttgcagcccatcaaattcgagtttctgttgtgctgttccatcctgctgattaaagcgagtatagcggcggatcaaagaaacaatacgggcaatcagttcatccatatcaaaaggctttgttaaataatcatctgctccagcccgtaacccccgcacttttgaagcactgtcattttttgatgtaaacatcaaaatcggcaggctgttctctttgcgaatttcttccagcgtttcaaagccatccataccgggcatcatcacatccagcaccacaagttggtattcttgctcttttaatttctgcaagccctcttttccggtattacaaaaatcggcttctatatgttctgattgtacgctgtgtttaatcaaagcgcacagttctctgtcatcgtctataatcaaaattttattcatggcgcagctccttcccttgttttgtccggccatcaatcggcttctccgcagttttagggatcagccaaacaccagccattttcacagcaccgtggatgcgctcaccggcacacaaataattgatttgccttggtgtaacaccccatttttcacttgcttctttcagtgtcatataatccatacagtttccctccaatacggtttattatatttcttttgctcgaagaatacaaggcaggaaatatgaataataaagtgcaaatcatatccagaagaagccatgtatcggaagaaagaggcccaacgcaaaagatacctcctgtctacgcatttaggacggtaaaagtccacggaaatcaaggggttttccgcatggtcggcaggcaggtggataaagttatcctgttcccctcaaaacggggttctaaatgcggaaaaatggacaaaaagaaatgccggacgcagaggctttgacagcccccgcgcccggcgttttgcttattcgtctatgaagtggaaccgctgcgccgcaaagtcggcgtcgctcatggcgtccagcttatcggcggtctggcaggtcagcgccgccatttccttgcccatgtccggcaaagctgcccggagatttgccgccgtcctgcggcggtcggcgttgtggtacagacagatcaggttttcttcttccacggtgaaatacattcctcatacctccatttcttttgatttttcccgcgccgggggtttctttttctgttcctccttggcggcggcaagctgcgcccggatggacggtttcttttgtttctgcgtcgtctttcgagtctgcttgggctttttggcttccgccttggctgcctcggccacatccaaaagggaaatctgttccccggctttcgcccttgcttccagttcctccatagacggggcattgttcatcatgccgtcaatcatgttgtagttctgctcggtggacatttccgccgtcttgatatggctttcctgctgggcggggatagcaaaaacccttgtgccatttgccataatgagatacctgccgtcctccgactggtggtggaatccatacccggcggcctccatctcttcccggctcctgtcggtcagatagaaacggccccgtggcgtctggatttgttcgccggtcatgcactcgtccggcgtaagctgcttttccggctgggcgaaaaactccggcacctgccggtaatcggccccctcgtccacatagtaggcggtctgtttcccatcctgccggaacaccacaatatcccccatcgagagggaatgtcccttgtaatcggcgggatgttccatgttgaagcggcggtaaatctcgtccagtgtggtgtccttgtccagcggagcggtgtagacaagctgataattcttcctgtccaccgaaagcccatccgcctgcaattcctcataggaacggtagcgcaggttgcgcccctccgggccgggcggtacttggtagatggaaaagttgggctgcgccggggcctcatagtcagaggcaacatattcctccaccgtcagcccggcagcggcggcctcctgtttcagctctgcctcgatctgttttttgtagtcctgcaagctctggtcgaagtcggcaagctgcggcggctccggcaagtggtactggccctgattgagaagcgggcggcactcctttacatagtctaaaactgcgttgaaataagcggtctgttccggcgtcagggtttccccggatcgcaggggacgccgggcctcctgctccatagcggccagattgcagtgcagctccatatacgggacaaactcatgcagcagcatatcccgctgggctttgtccgcctcccatgcctccggcccctcatggtgcagcacatggtttttccagctttcatcctgcgcgtagtattcgtgatagccccggatatgctggatcagggaaccgtccccgtcgccaaagtcctgccgtccctcgtagctgtctggctggccctgcatggtaaagtcaatgcggaacttggtcttgtcgtaccaatggcccgtatagcccggctgctcccgttcatggcgtctggcgctgtccagctccttgaaaacggcctcggcttcatgcagcggcatttgctggccgtctttcagatgggggctttcgctccaaaggatcgtgacaaccggctccgctgccggattctgtacgatctgccgctgggcgttggcaacggcaatctcactttcgatctcgcttttcacaaaggaatccatctggcccttttgcagctcgtagccttgttcgcacaggcggttgataagcccgattactttgtcggtatcgcccacggcctcggcataggccacaatcaactgccgttcctcgctgcccaaacgcagggcgtttttctctgccagttcaatcagagcggcggcccggtcagccggggacgcctccggcatgaacggtttcccattcaaaaggccgtcgatcccgttccacgcctgcggctggggaatggcgttggcctgttcagcggcttccagaaaaccgtccatcctgtcgccggtcaggggttccatcgtcccagccggtagctcatggatggcaaggatttcttttccggcttccacaaagggcaggtcgggattgtcaagctggcctccgttcagttccttgtagtcggggccgtacagtgtgtaatcgtagccggtttccgatgtctggatatacaggtaatcgccgctttccagacggtaggcggcctcctgcggggctttggcctgttccagtgttccatccccggcaatggtaaagccctgcgcctgcgccgcctccttggttccctgcgacacttcgccggtggatttcaaatccgcgtcaatgagggtttgcagcatggcttttacgctgtcggtcatttcctgctgttgctccggggacagcttggaaaatacgctgtccgggtctggctgctcggcggcctgttctaacggcgcggcctgcggctgctcctgctgggcctgccgttctttctgaagctgggcaaggtggccgtcaatggtggtaatcagttcatgggcggtggcccggatggtttcaagggaggctttcagctctttcaagtccttgccggaactccaaccggccacatagccaaaggaatagtcggaggtgtccagcccgtagtgctggcagacggcgtaggccacgctttcagcctgcacttcgcgggtgcggctgtcggggcggtcggcctgctctatggccggggcttccgggtcgatggcgtggagcttggaatgggcgatctcgtggatagccgtctttagggtctgtaattcgctcatgccctcctgaatagcgatccgcttttccgtcaggtggtagtagccgtgggaaccgcccggaatgtcctcaaaaccaatgggaaccggggaggtctgttccagcgccttaaaaaattccccgtagcgttccacgctgccggtcagttcttccacgccgatagagggcagcggttctccctcggtctggctcacatcaaagacggaaacgatcttaaaggccggaacctgtatttcctgtacttcggtaacaggctttccgtcttttcccatcaccggcctgccctgtgcgtccagcttttgcacttcctttttcgccttgaacggggccggggccagtatcttgatggccttttcgcctttcttcacattgcggtgaaaatcgtctttccacttgttgtagcccgccacaagctgtccgccctgcatggcgatcaggagggtgttgttgaagctgtaactgtggaacttggacatggtggtgagataggctttgtagcgttcactctcgaaaagctcctgtatgccggtttccagccggtcggtgatctctttcatgcgctcggcgctgttctggccgtttaagagaataggagtgacaggctgcggggcctttgtaggcgctgccgcctccggctgcaccttgctttcctcccgcagaatttccggcgcaggataggccatcacccggtattcctccggcactggctggccctcatggacgcgctgccattcatcgccgctttttaccagatagccataatcggtaaaaacaccatgctctgtgttggcaatatgcaggccaaaacggggcaggaaaatcccagctttccattcctccggcatatccaccatgccggaacggtttagatagtagtcgcccaactgtcctgtgccggtgacatccggcaaatgcacataaaagtccacattttcgggatagtcgataatctggccgatattgtgaaaatcactctgcggacttgtcagggcggcgttcagctccataagttcggcggcgtccagcttttccaatcttgcggcaaggaagtttaattcatccatgcctgcggacagcaccatatcacggggcagcttaataggtcgcttctgtgggcttctatacccatatagaaaaaagtcctgtggattgtcggtgctgattccgatttcccgcagggctgcttgcagtttttcggttgtggtcggcagagaaaaccataggccctctttgccttgctcataacgctgtcggttatgaagcagtacggaaaacacttcgctcattgaatcgctcctttcacataatataagggtttggggcttcccaaaagagaaaatccccggcccggcaggtgcgccgggtcagggattttgccgggagtgtggctacactccctatgcttgctgtttttagtttttgcccctctgttccacgcggtagtttacatactttccgccggtatcggccaaaagcaccgtcccgtcataggtcttgccggttttcatggagcgcaggccctttacctttgcttttctgtctttaaggagtgcggcggcgatcttcggggtgaacgccttgccccgttcctcaaaaaatcggtcattcttccacatgacaaactggcagcttcggtttccgcagtagtagttctttttgccctcatagacgctttccccgcagcgcggacatttgccgataaccacacgctcggtttgaaacaatttctgcgcgtcctcgctgatctgggagtagtttgcaatcaggccccttgtcatttctgcaatgccagccatgaagccctccgggtcggcctgccccttggcaatggccgtcagctccgtttcccactgtgccgtaagctggggagaggtcagcacctccggcagcacgcaggcaaggttgtggccgtccttggtgggaagtagctgtttgcccctgcgttctacaaagcccatctgcaccagtttttctaagatggaggcgcgggtggccggggttcccaatccctgccgctcggcgtcctccggcagatcgtccgcaccggcgcgctccatagcagaaagcagggtatcttccgtgtaggattttggcggcgctgtgaaatgctcggtgacggcagcagttaccttgtcaaaggtctgaccctcggagatctccggcagttcccgcgcaggctccggggcggtgtcgtcggcgtctgttttgaacgacgccttaaagcggcggtcaagctctttccagccgggggtcaggatggtctttcccttggcggtaaaggtgttcccggcacaggtaaatgtggcggtaacagcctcgtacacatggggcgcggccacagcgcatagcagcttgcagcacacaagggacagcagtttcttttccccctcggccagcccgtcaaagcctttctgcacaaattccatcgtcgggacaatggcgtggtggtcgcttacctttttgctgttcagcacccggccaaactgcggggacaggtcaagtcccgccgcaaagggaagcataggccacaggccggacacaaggctttccgccgttggcagcatatcatcggtcaaatactggctgtcggtgcggggataggtcagcagcttcttttcgtaaagctgctgggcatagtcaagggtctgcttggcggtaaatccaaacaggcggtttgcctcccgctgcaaggtggtgaggtcatagaggcggggcggctgctccgtctttttctcccgtgtcaccgacacacaaacggcctgcgccgtttcacaggcggctttcagcgccttggcgtcgtctgcgtttcccatgcgttcactggccgcctccatgccgcccgccgcgatctggacgatgtggtatttctctttctggaagctgctgatcttggcctcccggtcaaccaacattttcagggtcggcgtctggacacggcccacggtcagggtcttgtggtagaggatggagaaaagtcttgtcgcgttgatccccaccagccaatccgcctgcgcccggcaaagggccgactgatacaagttgtcgtagtcggcccccggtttcaggtgggcgaagccgtcttgaatggctgcgtcctccatgctggaaatccaaaggcgctgaaacggtttcttgcagcccgccatctggtagacaaaacggaaaatcaattccccctcgcgcccggcgtcggtggcacacacaaggccggtaacatcggggcgctccatcaaagaacgcagggtgtcaaactgctttttcttatcgtcgggaatgatatactgccattgctgcggcagaatcggcaggtcgtcatagcgccattttttgaaacgctcgtcataagtcccggcatcggcaagggaaacaaggtggccgatgcaccagctcaccagatagccgtttccctccatgtagccgtcctgtttcttgtccgcgccgatcacgcccgcaatgctgcgggcgacacttggtttctctgcaattactaactgatagctcatacttcgtcctccttatttccatcttcacttgtcatatcctcgtccggctccggggcttcgtcctcgtcgtcctcgtcctcgccaaagtcatactcggccagatcgtcatttcctgtggtgtcagctttttcctttttgaatttcaggaagtagagggctgcgccgccgcccagcagcaccaccacaaagaacaccacaaggccgcccattccgcttggcttttcctcctgcggcttttcttcctccggctggggcttcggctccggcccgttgcaggcggtcaggttgtttttacagaccgggcaggccgtattgacggccccagcttgacatttggccgtacagttgcagacctccggctctttttttccgtcctccaacaaggcttgcaggtcggcgtcatccacttggttgaggaaatgcaccgccgtttccttatcctcgttggcccggtcgatcaggatgtaaaaataattcccggccttggtggtaacggtgataagctgcttatccccgaaaaaatcatccaccagcgtggcgttgccctgcggggtaacaggtacaccctccggctccatgccgccggtggtaggttcttcggtttcctccggcacctctgcgggggcctcggtggtttccggcagcggcacagggtcagggtcagcgcctccggcgtaggcggtaacggtcgtggtcgccatgcagagcgccgcagccacagccagcgtcaaggtgcggaacagtttagatttcttcatgggcgctgtcctcctgttcaaagtccgggatcggggccggggctgcctgcaacgcgccgccgcgcacaaaggcggcgaactcctgcggggtcatgttgaggccgcgcacaagctggacgatctgcaagttttcctgttcggtcttggccgcttccagctcccgaagctgattttgcagctccgcgatcttgcccttggttttctcaatatccttttcaatgcgctccaatttgttcattgccatagtgatttactcctttccaaatcgttcctgccatgagtagttgcgtcccaatccttttacggtttttaggttgggcatggcgtttgcttccagcgccagcgcacgctgatacaaggcgggattgtgttcttttagattcaaaatttccggctgcttcatgctggggcaaaaaaagcaggaggatttgcccggctgcggcaatcctgccgcctgaatcacccggacgcaatcgctcctgtcccagccccattcttcaatcaggggataatggttgtaatatttcttgtcagcttcatcaattttgcgggaacgcagataccgccgcatttccccggcgtcaaaaccgataaagcggttgactttgccgccgctggcccaaacctcccggcagggtgcgtagtggttgcagaatttttcctgcggcccgatcttgtgcttgagggaacaccgcttatgcccgtaggcaatggacggcagggtgcaggaacgcagacattccatttcaagggtcagacggttgcccgcccggtcaaccttttccacggtagtgatctgcggcataccatgttcagacagccattgattcatgtactggataaactgataggtatggggatgttccgccccggtatctgcaaacagaatcaggtcaaccgggatgttgtgctgataaagcccgacaagcaaggcggcactgttcgtaccgcctccaaaagaaacaatgttgataggccctcctttctggcgtttaaggcaaacgcccgtaacaataaaaatgctgctgccagtagcttgaattgaggttcgtgtaggaaatggggtcgccgcagtgcagcatgaccgaatttcccacatacagccccacatgggacatcccggcagtgtcgtaagtgccgacgaaaaatacaaggtcgccgggcttggcctgctccggggaaacgggggtgcagatgttgtaaagcccctgcgccgtctggcgtcccacattccagccggaatgattgatcacccagctaatgaagccggaacaatcaaagctggtgcttggggagctgccgccccacacatagggatagcccacatacttttccgcctcggcgatcatggcggcaaaggcttcgtcctttagcgcctccggggggatttcatagtaggtcggctctttcggggtggaggcgtggggatagctgccgttgggaaacaggtctggccggttgcccaaagtctgcatataggcagcataaaagcccatctgttcctcggtgagaatgtagatgggcaggtgggacaggtcaaagttttccagcttcacattgcagatgtaataggtgtaggggacttccacggtataggtgtttccctcgctgtccgtcctcgtttcggtgcggtagcgggtttccgtttcgatggtctgggtcaggatgtactgctttccaaagagcatggcaaggtcgccctgtacctcccccaaagtgaacacgccgttatgcagcgcggagaggatggaggtcagcacataagggtcatgcttgatctcgtccagatcgaaacggtattcgtcatagccggggtgcaggctttcgtagttgtcaagttcgtgctgcaagtctgcttccagcgcggcataggcggcttcggctcccagcatatcgctgtcctcggagagataggaggtggcggcaaggcccgtcccggtgctgccaaacatggcggtgcaggattgcaggccgcccatcaccagcaggagcatgaggcccacgccgccgacgatcagcgcccctttccagtgccgggcggcaaaggacgcggcctgtctgcttttctctgcggctttcttggctgcggcagccgtggtcttggcggtgcttgccgccccctgtgcggtctggcccgccgcccttgctgccttggcatattcccgcttgatgtgctgtttctgccagaagcgggaaacggggttcttggccgcctgcgccagctccgggttgtcccgcagggatttttgatacgcaaactcggcgttggcggcgatggactttcgctcggccttggctgcggcccggtagggtttgagcttgtggcggtggacgccgctgcggatcatgcggcccgcctgccgttccgccagttcctcccccttatggccgccctccacgcccacattttcgtgttctacctcatggatttttccgtggaggtaaagcccggcttcctgtatggggcggctggccgggtttggtttgagctggggaggggctttctccaccttgtcaaaatacagcctgcttttggccttgcccttggcctcgtcatagacggtttccttggtaacgacgcgctttttcggcagggcttctttggccgcttccagcttatccgcccgtttttccgcctttttgatatacggggccagctccggggaggcccgttcctcggcggtaaactgcaaccgggaaacagggccggtggcctgcgccacggtttccccggcgtccttggccgctttctttgccctgtggcggtcgtgcagttcgtccgcccgttccagtattttttccgccgcgccctccggctgggcagtgtattcctgctcggcctcccggctggacacattgacgctttcgcctgtggtctggttatccagcgtcaggccgtcgcgggtcatgtgctgcgtcaccttgtcgcggggttttaagggttccatgacttcacctccttgtgcctcataccgtcgccccctcgcctaaccgggtcgtcatgatctggtagagttgggtgtttttcgggatggggttcttaaagggcaggatcacattttcgtaaatgagaagtccctcgccgggttcggaattgtccacataccgtaattgctggggcgaaatgttcagccgttccgcaaggattttgcggtcgccgctggcctgattgagcaggcagataaagtcgctgttttccaaaatgttctcaatttccggggaggaaagcaggtcttttacattctgcgtcgcacctgtgggaatcccgccccacttacgaaaacgcttccaaatctcgcaggaaaaggccgccgtctgttcctctcgcaaaagcaggtggaactcatcacagaaataccatgtcgccttgcccttgctgcggttttgggtgacgcgcccccaaatctggtcttggacaatgagcataccgattttctttagctgcttgcccagctccttgatgtcaaaggccacaatgcggttttgaatgtcgatgttggttctgtggttgaacacatttaagctgccggacacatacaggtcaagggcctgcgccacccggtcggcctccgggatatgctggtctaacagggctttgtgcaggtctgcaaggatgggcatattttccggcttggggtctgccagataaggccggtagatcacctgtaccgcccggtcgatcaccgtcttttcaatggcttccagcccgttcttgccgcccatgacaagctcacagaacgacagcacaaagtcggatttcaaggccagcgggttttcatcctcggagtagttcaggttgatgtccagcgggttcacatagtttttgctggtaggcgacagcttcaccacctgcccatgcagccgcttcacaagggggtaatactcggcctctggatcacagatatacacatcgtccggggtgcagaggaacacgctcacaatctcggatttacagctcatacttttgccgcttcccggtgtccccagctttagcccgttgggacacctcgcccgtttacggtcaagcataatcatgttgccggtcttggcgttgatcccgtaatacatggcgtcgccgccctgaaaaagctcctgcgtcacaaaggggacgaacacggccacgctggaagtcgtcagggagcgttcaatctggatgtggctggcccccagcggcaggctgctcataagcccctgttcctgctggtagtccagccgcacaagggaacagttgtatttctgtgcaataccggcagcccagaacacatcgttttccagcttttgccgggtgtctgcggtgttcagcaccaaaaaggtaagctggaacatccgttcattccggctctgcaaggtctttaacagttccttggcgtcctgcccgtaggtggcgaggtcgctgggaagaatgtccatgtcgtaaccgctgcggacagcccgtttctgttcctgaatcttcatggcgtcaaggtcggtgatcttacgcttgaccgtcttaatggcgtcgctctggtcgatggcctgcacatggaggttcaccacaatgccgttttccgtgttgagaaaatcggccagcatttcatccgacagctccggcgagaggatttgcaggaagctcaccgccccgtatttgccgcccagcccgaacatccgggcattgccgaagcggaacgaggacggggcgataaagtccttggtagaaagccccgatggggcaagccatttccagtcaaaggagaacggttccccgtccgggtggaaaatgctgtgcatgacttccagccgttccttggcatccagtccccacgcggaggctcccatgctcttgaaatagcccaaaaggtcggtttcgatccggcgcagtctggctcgggccattttcaggctgtccgcctcaatggtgtaggtcataaatttccgcttcatcaggccgttgttcccgttcacaagctggtcttgcaaaatatcggaatactcgctgcggatgtcgtcgaagtcgtccccctgcgcccggatttcaaagctcttggcgtactgcttggggtcgatcttgcggttgataaaggaaaactgcacatgaatggaagcgtccagatagttgtagaggtcgcacaggttttcaaagatggcggtcttggtgtccgcctgcgccagttggtagctgatgtccgtaaactcaatgcacttggaaaaggtgcggggcgttacccggcacacgccgtcctgatacatggcctcatagggaatactggcctgcgccgaatggggcctgccgtcgcccttatactttcggatgacagcctgaatttctttcttttcggcgcgggtgagcttgaccggcgcttttgcgctcgtttcgttcttttgctttttggacaatggcgttgacctccttttccatttgggattgccgcacaagggcggtataagcgttgttagtctggtagggccgttccttgggctggatgaagcagcactctacgatctggcgcaccaccacttcaaggggctggccgtgtttttcgtaaagggccagcagaaagcccggcagcatggcgaacaccataatgagcgccgccgcgctggtcgggacgcggccccggatcaaaaagaaaagcgggacgcctacaagcagcgcaccgccaaaacaaatgagctggcgtttcgtcagcccgaatactaccttggatttgaccttggttaaatccttggggacagttacataagccataaaaagtcacctcgtttctggtacggacaggaaaaaatcgctgtccacttcattgccccacgcatcccagccgggggttttctgtctggcaaacagttctgcgcggggcaggtcgcccgcaagctctacaattttctcacgggtaatgtctggtttcttgctgtgttcctccaccggggaaatgataaactgatggacgcttttggagtaacgcttggggtggccccgcttggcaagcaggcagatttccgcgtttcctcttgtccagtagcccagcccataaaaccatgtggggcttttgcggttcaatttcagccagataaaggccacggtcttaaaggtgaagccccacgccttaatcagacgcagcgcctccgggagctgtgggaaagtcgcccacaaaaacaagaggcagtctttttccgccagcgtttccaccggcagggcgcacagctcgtcaatgctcatggtgggatagtgatgttccgccgcccctgtccgtttgcactcatatctccacggcgggtcggcgtaaaggatgttgtaggttttcttttgtgtttcttcgatagttggtattcctcctgtctgtcaatgtgcggtaaatacggctttcgatatgctgccggtcttgaacagacagaagcaaagcaaaacggtatagcccatacagccccagattgcaccggatatgtcgtcagcggttccgatctgctggatcagcaccgcataaatcccgacaaccaccatgattaaaaaggcttggaagcccagcgcaagcagggatttcaagtagttctggcccatgccgcgccactctgcattgcccagcgtggcaagggggatcggccccaatgcggtcacggcgtaaatttcaatcattcttccataggtcacaaggaaaatgcagatggaaagaatgttcatcgtcagccccacaacaagtgtctggaaccacaggcccagcagcggcccgatgtccattgcttcaagacggctttccagatcggggagcagcgtgtcaaaatcaatgctggtatctccgataatcaccccggcactctggttgacgacttgctgggtggcgtcaaatacgcccatgacgatattccatgtgtttgtcacaatgaggatggcaaaggcacttttgaaaatccagcggaagaacatggagctgtcgaagtcgtgcatattgttcttttccacaatcatgtcgatcagctcatagcacatcacaagggcgagaatggccgccgcaatggggacgatcaccgtttcggacaggttttgcagcatggagaaaatgccgccgttccagtcctgcggggtactgcccacatccgacgcgatttccccgactttggtattgaccgtgttaaacagaccggacaggttgcccatgataccgtcgatcaggattcctttgatccattccccgattaaatcaccgatcatttggggacacctcctttcccgcgccctccccgatcagagagggcgcggagggttttctaacacacatggggttatcccagcagcccggacagcagcggaacaagggtcatgccaatgagggcaacgccacctccggcgacaagctgcttgattccctgtgacttgctcgccgggttgtccgccccgtatccctccaaaagattgacgccgccccatacgcaaagcgctccgccgaggcccacaacgatggtctgcaaagtatcaactgcactattgaaaaattccataaatatacctccataaattcagattgtgatgttgtttgggtgcaaaaaagccgccgttcacagcggcagcctcacaatccgcagacggcccggagttactggccgtcccgccattccagcacagccagcgaaaaaatttcgccccatgcttcacacagtctgcggtctatttcccttgcaagttcttcggcttccccgtccgtgggcggggtatcatgttccgcgatccactggcacagcaccgcagcggaaatgatcgcccggtagatttctttctcatacctgaaataatccgcaaatgtccattcgtccgagtgtcccatcggtcacgctcctttccctatgaccgctttattctgcggcaaaatcttcctccgacagctcaatgtcgtagaggtcaaagggttcgtcctccgttaccacgcgccgctttttccggcgcagggacgacaggtagctgtccacatcaaaggtattctttttgtcagcgtccgagaggtattgatagcgggggtggcgggtgatgtcgtatttctcactgaaaaatggccttacgccgcgcacctgcaaaatacacttgcctccgtccatcgttgcaatttcgtcttggctcatcagctcctttccgagtttttgatagttcagtccgtgggaggtctgcgcgccccggttctcgctctggttgtagctgtcaatggtttccttgcccagcacctccgcgatctccttggcgttcttgcccctgccactaaggaacagcgtacagtcgcagttgtcggaaatgatttccgccgcgtccttgtaaagagcctttagctgcgactggctctgcaaaataatagaagccgagatttcccggcttcggatggtggcaatcagcttatcaaagtttggaatctggccgatgttggcgaactcgtccagaatcagccgcacatggacgggcagccgcccgccgtatttgtcgtcggcccggtcacacaaaaggttgatgagctggctttgcaccattgccagaatgaaattaaaggtcgtgtccgtgtccgacataatcaggaacaaggccgtttttttatccccgatggtgtcaagttccagttcgtcgtcctccatcagctcccgcacctcccggatgtcaaaaggcgctaatctggctccgcagcttatcaaaatggagctgcgggtcttgcctgccgacagcaggaatttacggtactggcgcaccgcaaaatgttccgggtctttttcttccagccgttcaaacatctggtctaccggggattgaaattccgggtcgtcctcgcgggcttcactggcgtttatcatttcaagcagcgtggtgaaattcatttcatcgtccggcgcttcgtaccagatatagccaatgagggccgaatacagcaggcgttccgatttgatccaaaaatcctcagcgctcttttcgccctcgcccttggtgttgcagatcagcgtgtttaccagcttcaaaatgtccttttccgaatggatgtagcgaaacgggttgtagcgcatactcttggaaaagttaatggtattcagcacctttacccggtagccgcaccgtacaaggagctggcctacctcgccgatcagacttcctttcgggtcggtaatcacgaatgaggtcgggtagtccttggacacgcactgcatgaggttgggcttcacaaagaaccgggtcttgccgctgccggaaccgccgatcaccagcacatttttgttccgggcggtcttggggtctttgggccggttgttcatggtgaggcgttccgtctgggtcaggaggatgttgttgtcaaacaccgggtcgatgtacggggctatatctttggggctgccccaacgggcgctgccgtactcgacaccccggcggtatttcttggcgttcttgcttttgcagtacaccatcagccgcagcgccaccgtaccggccacgcccaccgccagatcgaacaggtggaagctgggggcggcgctttcaaaggcaagggaaaagccgtccgcaaggtgcaatagcttttccgacaagtccgccccagccgccagccggtaagtctgtcccagcttgccgaacaggtaaacaaacaacaggtagggcaggttggcgattatcagttttttcatttccggcttcatcgtgacagccccctttccttgattttctccttggcctgctggctgcttctggccgctgccttttctttcaggacggcaagggtctttcggatggaggggcgttcctgctgtttgagcttcttggccgtaaactccttaaacgcctgttccagattatccgcctgcttggatttgaagatcacgatataccggggcggatgggtggtgcggtctttccgcagagtaaaatcaatgtcgtatttcttggcgcagggcttaaataagccaatgttggcgtcggtgatctcaatgttggacagggcggaaccgtcctttttgagctgccgtaagctctgctggccgtgatgggccttgcccgtccctttctgccgggcggccagatattttcggatggccgcttgcagcacttgggcggtgagcttgcccgtcttaaccgctaacgctatggttttctggtctacttcttcctgcaactgctatccctcctttggaaagtcagcaggcaggcggatggcttaaatccgcacccgcaggccggagaggtcgtcggcatggattcccaccagataccagttctcggccatttcaatgcgggtcggcctccatctgccgcccaccatcacatcaaaagtttctccgcagtgcaggccgccgtaatagtccgcaaggtcaaagcggatgtcgtagcggtctgtctgctcgtcaaaaatcaaagcaccctgtttcatagggccgtcctcctttcagattttgcctgtattcatgtcatgggccaccagcgccgtgtaatagccgttgatggtgcttggggcgttgaacagaaccgccagcaggtattttttgatgttccgtatttccgtggtgtttttgctgatacagtcaaagacaaactcaatgtgagaactgttcagcttcatcagcttggatttcaccagctcggcggggtaatcgtccccggcaatgcggatagtctttcgggcgctgcatacggtttccaccagcaagtccacgatctcgtccagcatatcccggtcaatccccttggcgtactggcaaaggtgttcatactcgatgttgtccttgatgatctcccgataaatctctacggcgctctgtgatttcgctcccgttcctttccgtctttatttaattgcgttgttttttcctgcgtaggcttttcctgcgttggattatccaatgttggattttccaatgtaggtgaatccggcacaggctggggctgttcgtaaatgatgtaatccgccccgcgcaggcggccttggctgtcacgctcacgggaacgcacgatatagcccgcctgttccagctcccggacagccgcccggatcgcgtcgatctgctcccggttgataagggacaagcctttcagcgtaaagtcccagctctccggcaaggacagcatttgcgacagcagccccttggctttcagggacaagtccttgttccgcaggtggtggttggacatcaccgtgtagccccggtttttctccactcgaaaaactgccatctcgtcgcccactcctttcacttgaaatttcactgcgccgtcaagggcggtgagcttgcccggctggtagggacattcctcatacacacaaaactggtacttccagtgcgggcggtagaaacggcaggtgccgcagtcctccggcgctccggcctcgccgctgtcaaaatgatctgcgcccggcctcgtctgcatgagctgttcaaaggcccggtcgctgccggaagtaaagtacataggcggtcgcctcctttctggttttggacaaaagaaaagccgcagactttttcaaaatctgcggcgcagccaataagaaaaggacactgctttcacaatgtccttttctatcaactatttaattttttgtgttcccacactccatatcaatgactaccgaaaccgtgatatagtcctcaatgcgcttattgcggaacttatcaccctcggcgtcaaacaccacatgtcgggaaaagtgcctaaatctaaggatttctacaaggttcctctttgtagcaacactattgtctccacatgcttcgtcctcggaaacagatccaccggctgtaccttctctgcatggtatcccttctgctccagccatgcggcgtctcgggcggcggtggcggggttgcagctgacatacaccacccggcggggggccatgcgcaccacagcggagagagtggcttcatcgcagcccttgcggggcgggtccagcatcacgatgtctgggtgcaagccctcggcggccagttgggtggcagcctgaccggcatcggcgcagaagaagcggctcttggctgctacggtctcgcccatgcgggcagcgttggccttggcgctctcgatggcctccggcacgatctccacgccgatcagctcccggcattgatctgccatggaaaggccgatggtgcccatgccgcagtagagatccagcagcgcgtcgtccggggtcagctgcgcgtactgcgcggcaaccccgtacagccgctcggcagccagcgtgttgacttgatagaaggacagcggccccagacgcaccggtacgccgcagagaacgtcctcaatgtagcccgggccgtacaggatatggttctcactgcccagaatgacattggtgtttttggcgttgacgttgagcaggatggtgctgatggcagggaactgctcccgcagtgcggtgcaaagctgctctgcatggggcagctttgcccgggtgcataccagacacaccatgatctgcccgctgtgcgcaccgcgccgcaggaagatgtgccgtaccagccccttgccgctctgctcgtcgtaagggcggatgccctgctgtgcaaaaaaggcgcacagcgcattgccgatctcgttcagcacgccgggctgcaacttgcagtccgggcaggggacaatgcggtgggtgcgcccggcgtagaagccgatgcagggtacgccgttcttgtccacgcccacagggaactgcaccttgttgcggtagcggtccacctccggggagggtaggatatccagcaccggaacctccagcccgccgatgcggcggaaggcgtccagcacgctttcctgcttggcgcgcagctcggcagtgtaggccagatgccgcaggctgcacccgccgcagggacctgccaccgggcagtccaccggaatacgatccggcgagggagtgagcagctcgtccagaatgccaaaggcataccggccgcagtccttcacgatgcgcacccgggcttcgtcccccggggcagtgccgggcacgaatacggcctcgccatcggcactgtgggcaacgccgctgccgtcgctggaaaggcgctcgatgcgcagggtcaggatctggtttttctgtaaaggcatggtttctccttgtgtgatgggctcaggttacagttgggcagggtctgccgggtcggcgtcctgctgggcggcaaaatacttgctgggcggcacgcctttggcgcgcttgaacacccgcgagaagtagaactggtcgaagaagcctaccgacaccgctacctctgcaatggaaagactgccggcgcgcagcagcttgcaggcttcgttgatgcggtactcggtcaggtagtcaatggggcttttgcccacgttcagcatgaacacccggtacaggtggctgcgggaaacacccacgctcttggctacatcgtcaatggagatgtcgtgggagtagttgaactggatgtacttgatggcgttcagcacatactggctggaggaggaggccgtgtggggcttgcctgcgctggtctcccgcatcagagcggcgatgaacaggtacagataccccaccatggcggcttcgtcctgcggctgcagcccgcgggaagagtagatgttgttcagggctgcccgcatcccgtccgggtcgctggtgtggtgcacaggtgcatcgtctgtaaagggcagctgcgcggcaagcttgtgggcacaggcaccgttaaagcctacccagctgtactcccacggctgctgttcatcggcggtatagcggatcagctggctgggacgggcgaagaacagatcgccctcgctcacctcccaagtgcggccgcccacctcaaagatgcccttgccggataccaccagatggatcaggtagtggtcacggatgccgggaccccatgtctgccccggagcgcaccgctccaggccgcagttgaagatggacaattcaatgttgttggtgtaattctgcttaaaggattgcttataaacgtctggcatggcagctttacctccgtcctgtcacattctgcacccagtataccatagaacaccctgcaaattcaacaaaagtacatcttattctttgcgcctgacgccgaaatttggatttttaaggcaaataaattgaaaattcgcccgaaatgcattacaataggcaaaaaagcagaatcgttcattcttgaggggaggagctgtcatggccaccagtgcacaactcagaaaacagatcctgcagggcagctgggacgccgcacttgctgcactttacggggcagacccggcggtactgcagcggcagcgcgggcgttatgcggcagcgctggagcagttcgagttatatttcggtcccgggcggcaggtgcaggtgtactctgcacccgggcgggcagagttgggcggcaaccacacggatcatcagggcggctgcggtcttgcggctgcggtcacgctggatctggtggcggtggcagcccgcagcacggatggctatgtgcgggtcaagtcccggggcttcaacaagctggatgtcattgatcttgccaccgcagagccgcaggcaggggagagcacccactcggccagcctgatccgcggcattgctgagggcttccgcgcggtgggcaggcagatcggcggctttgacgcctataccgccagcgatgtgctgcgcggctccgggctgtccagttcggcggcatttgagatgggcatggcctccatctggaacgaggaatacagcaccgggctgaccctggcagagctggccggcatctgccagtatgcggaaaacacctatttcggcaagcccagcggactgctggatcagctgaccagtgcggtgggcggtattatttttgcagattttgccgatccgcgtgccccaaagatcgaaaagctccatgcggacggtctgctgccggaggggatgttcctctgcgtcaccgatacccggggcagccacagcgagctgactggcgagtttgcagccatccggcaggagatggagcaggtggctgcctgctttggcaagccgctgctgggtcaggtggaagagagtgcgttctgggcggcactgcctgccctgcgcagccgctgcggagaccgtgcggtgctgcgggcgatccattattttgaagagaacgcccgtacactggcgcagcgggaggcgctttatgcaaagcagtttccggtatttgcggggctggtgaagcagagcggacaggcttcctttgcgctgtgccagaacgtgtactgcacagcggatgtgcggcatcaggggctgtcagtggcgctggctctgagccagagcatcctgcagggcagtgagggcgcatggcggatgcagggcggcggctttgcaggtaccattcaggcttatgtgcccgggcggctgctcaagcggtaccatacagccattgagcaggtgttcgggcagggcagctgctatgtgctgcgcctgcgggaacagggtgcagtccgggtgatctgaacataaaaataagccgtgcatggccggaaagctccgggatgcacggcttttttatggcttactgctgcagagaaaagggctgggggagagagtttgtaacgggacgatcctttctctgctgttggatactgtccagatactggacggtagtggtggcggcttcgctggtcacaccaagcaaacgggcgaactgctggtacagcttgatgccggtctgtacgcctaccttgatcatgcggaaaaacagcatgggcacaaaggtgaaggagaacgagagcagcccgccctcccagaagaaatcaccgaagtgcaggttatcaaaaaagctgccgacagcatcgccgaattcgcttccgccaaaggcagtgcgctgctcttctggagaaagcgctgcataggaagcaggcagctgaagctttttcataaagaggaacactcctttcaggtacgataaaaacttagcacagggctaccagcgtaggcaggcagttctgctgctcggtctcctgtgcagcgttcttgttggccttatactcgtcaatggactccttgatggcggtcaccagattcttgacggagagatagatgctgcgggcctgaatataggcgtagtagccgcccagaccggccagaccgatagaagctaccttgctccaggtgttcagctgaccccagtagtgccccacggcatcaccaacgtccaaaccatcgttcaaggcattctgcataccggagacagcgccttggaatgcataacgacccatcatgcccagcagatttacagtaacggtcatgccaaaggccatgacctgctgcggggtgatattgatggaaagagcaccgccctcggtgtaggtcatctcctcggcagagagcacagcgtagctggcaggcagctgcagagggcgctgatatgtatgatccatgatggaaaactcctttcgcacacagaactccccaaggggcagttcatctagtaactgaattgtagcatatctgcacaaaaatgacaagagagcgcgggtttaaaaatcatgatacatttgtgaatatattgtgatgagcatttacaaaatagactgtgatacgatataaatacaaaaaacaaccgtttttatcacagtgaaaaaatgttgtagaggaaagcaggaccgtaaaaataaaaaacaacgaaggcatctgcccgtgcccgctgcgcaggatacagcagggaaagcagatgccttgtggctttgcaggatagaaagcaaaaggggagtgaacgtttaacgtttttccggtacacgctcatacagcgtggtcaacgcagcgatgtgcccggccaatgctgcgggcaggggctgcgtcagccgccagcgccagtttgcaccctgtgtgctgggggtattgatgcgggcctcgctgcccagatgcagccagtctgccagcgggatgatggcggtatccgaaacgctggcaaggcaggcgcagatcatgccctcggtcagggtctccggtgtgcagcgcaggtaccggcaggcgtaggcaacatcctcggcactggcgttgctgcgccagccctcggtggtcacgttgtcgtgggtgccggtgtacaccacactgttgcgggggtaggtgtggggcagataattgcccgattcccggctgtcgaaagcgaactgcatgatcttcatgcccgggtaaccgctctcggccagcatggcctttacctccggggtcaggtagcccagatcctcggcgatgatattgccgccgcccagcgtctgctgcatggcgtggataaagtcccggtcggggcctttttcccagtgaccgcccgcagccgtggtgcttccggcggggatggaatagtagctctcaaagccgcggaagtggtcgatgcgcaccacatcatagatggaggtggcgtgcttcatgcgctgcttccaccagtcaaagtcagtgaccttgtgagcaggccagtcgtacagcgggttgccccacagctggccgtctgccgcaaaggcatccggcggacagccggctacatgggtcagatgcatctgtccgtcggtctggaacaactccggatgagtccacaggtcgctggaatccgggctgacgtagatggggatatcacccaccaacaggacacctttgcggttggcataggctttcagtgcgttccactgggtatagaagaagaattgcactgccttgtggtaactgatctgatctgccagccgtgcttttgcggcggcaatggcttccggctcccggcagcgcagggcgtccggccagtcggcaaggccagcctgtccctgctcggcctttaccgccatgaacagggcgtagtcctccagccagaagctctgcgctgcgcagaaggcttcgtaagcagggaagggagccgccaacagccggtcaacagcctttttcagcagcaccgggcgctggttgtacagcgcaccgtagtcgatggtgtccaccggctgcgcggcggggagctcttcggcggtcagataaccgtctgccgccagtaaacggaaatcgataaagtaggggtttccggcaaaggcggaaaagctctgataggggctgtcaccgtagccggtagggccgatgggcaagatctgccaataggtctgttttgcctcggccagaaaatcaacgaatgcggtcgcttcactgcccagcgtaccgatgccaaaaggccccggcaggctgaacaccggcatcaaaatgccgcttgcacgcataccgtgcacctccttagccctttacagcaccggccacgacaccctcgatgatgtacttctggcaggtcatgtagaggataataatggggatgattgcaatgatgatgcaggccatcatgggagccagctccacgcggccgtagccgccgcggaaatactggatggccatggggatggtgcggtatttcttgatatccagcaccagcgtgggcagcagatagtcgttccatacccacatggtctccagaatagcggtggagatcatggtaggcttcaggatggggaacacgaccttgaagaagatctggatggggttgcagccgtcgatcatggcggcttcctcgatctccatgggcacgctcttcataaagccggtgaacatgaacacggccagaccggcgccgaagcccagatagatgatgcagatgttccaaggggtgttcagcttcagccggtcagcggtcttggacagggtgaacatgaccatctggaagggaacgaccatggagaacacgatcagcaggttcatgaacttgctcagcttgttgttcacacgggtcaggtaccaaccagtcatggagcagcacagcaggatcagcaccacgctggtgatagtaatcagaaggctgtaacccatgctggagagaaagtccatcttggtcacgccgtaaacgtagttgcgcagtccggcaaaagtttcggcggtgggcaggcggaacaccgtagaggtggtaaagctgccctcggttttcaagctgttcagcaggatcagcacgatggggtagatccacagcaggcagagaagcaccattacaacagcaaggatgacatcccaagttcttttctgtttcgacattactgctgcacctccttagagcgggtaaagtggagctggatcagcgagatgaccacaacgatcaggaagaacacaacagccttagcctgaccgatgcccttccactgcgcaccggagcggccgtagaaggtgttgtagatgttcagagccagcatttcgctggcgttggcgggctcgcctgcggtcaaggccacgttctggtcgaacagcttgaagctgttggtcagggtcaggaaggtgcagatggtcacgctgggcatgaccatggggatcttgatcttgaacaggatctcgcggtcgttggcaccgtcgatcttagcggcctcgatcaggtcgccgggcacgctttgcaggccggccacatagatgatcatcatgtagccaatctgctgccagcacatcaggatgaccagaccgacaaaaccggccttggcatccagtgccagcaggggcttctgcaggttcgccagcacaccgttgagcagaatctgccagatgtagcccagcaggatgccgccgatcaggttgggcataaagaacacggtacggaagatattggtgcccttgatgccgcgggtcagcaccagtgcaatggcaaaagcacacacattgataagtacagtgcttaccacggtaaacgccgccgtaaagccaaaggcgtgcagaaaggtggaatcctgaaataccgagaggtagttctggatgcccacaaaggtggtcttggaaacggtagtgaaccgctggaaggacaggtaaacgccccagataaagggccagatgaagccgatgataaaggcgaccagagtaggaagcacaaatatcggccagtatttactaatggctttttgcatgatatacctcctcagggagctgtctgataaaaaagaaaggagacgggcgaacttttcgcccgcctcccattttagttcttagggagatctcaggtcaaaggtttagccgttggccagcttgtactccttggcccagccgtccacaaatgcggtgacaacgtcgtcccacttgccggtacctgctgcgtatgcagtcagagcgctgcccacgccgttcttccactcctcggaaggcatggtggagaagcaccagtcaacactggtcttgccgtcggccacatactggtttgcaatggtaatcagggggttggtggaatcctttgccttcttgaaggggatgacgaagcccatcttgtcagccatcgcgctggtgccggcctcagaggtgacacaccagtacaggaagtccagagtagcctgaatgtcagcctcggaagaggtgttgttgacacaccagaagttctcggaaccggtgcacagaccctgattttcctcgccgtccacgccgatgtaaatgggcagcatacccagattgtcgtcgcccagatccttcacatcattgtaagcccaagtgccgttctgatagaacacggccttcttgcccacaaactcagccacagcgtcgttgccggtcttggaagccagcagcttggggtcgcaggtggaatcggtgatgtacagatcccaaatctgcttgtagttgtccagataggtgcccttgatggcgtcggtggagccaatgccgtctgccttatactcgtagtagataggcaggtttgccagatgggtcttgaagcgccagtcagaagaaccgtccatgccggcagaggtgaaagcaccgtccacgcccagctcagccttacgggcctgaatgtcatcagcgaccttcttcaggtcggcaaagcccttgatgtcctcctgcttgtaaccggcagcggtcagcagttccttgttgtagatgatgccgtaggtctcaatgacatatgcaatgctggtaacagcgtcgccatccttcagtgcaaaggaatcgctggtcagctcgccgtacagctggctgccggacagatcgtagcagtaatccttccagtttgccagaccaacagggccgttcacctggaacagggtgggagcctcgctcttctccatctcgctcatcagggtggtctcgtactggccggaagcggcggtgacaacggtcacaggcacgccggtctccttggtgtactcagcggccagatcctgccaatcctgatcctgctcgggcttgaagttcaggtagtagaccttgccgtctgcctttgcagcggtgctggaagcagcggtagaactggcagcagaggaagcggtgctgctggaagagccgccgcaggcagccagacccagagcagcggcagaaacgccagcggccttcaggaagttacgacgagtgatcatctttttcataataagttctccttcttattaaaattacagatcaactatatactctccgtccttcgacggagggaatacaaaatttaaattgcccttacgctttcgccctgctgcaattccggctgcagggtcacggtctgggcaggggagccatgctcgatctgccgcaccagcagctcgatgctttgcagcgcgatctgctcgctgggctggacgatggtggtcatcaccggcacgcaatagcgggacatcgtgatgccgtcaaagccgatcaccgaaacatcttccggcacccggaacccggcgctcaccagcgcccggatggcaccaaaggcgatgacgtcgctcatggcgaacagggcggtgaaatctgcccggcgggccagcaggctgttcatggcgtggtaggcggactcgaaatcgtagttggacaggccgtacagcttgtcgttgaacaggatccccgcatcctccatggcctgctgtgcacccttgcggcgcatcacgctgggatagctggtcaccggaccgcccagaacggcaatcttacggtgtccctgccggatgaggtagtccacagcggtataggccgctgcccggtcatccacgcccaccatggaaaggttgggaaagttcagctcatctgtgaccagcgtggtgagtaccgaagggacattgatgctgtcaaagccccgttggaagttggccacgctgccgcccagaaagatgatgcctttgggtttgatctcccgtaggatcttttcggcggcgtcgatctcgttggcgttctcgtccagataagagacgatgccgttgtacccgtacagggtggcggcgcgctggagctgcaccagaaaatcggaaaagaagatgttccgggtgcctttaactacgaacaccagactgcgggactgctggatcttcagctgtcgggcgttggtgttgggcacgaacccggcctcccgcatcactttcagaacgtgctccttggtctccgggcgaacatccggcctgtcgttgatcacacgggagatggtgctgacggagcagccactgatccgtgcgatatccttgatggtcagatttgccatgtcggcgggcctcgctttctgaaagtgtttcgggaacgttgtcgggaacgtttccagtgacattagtatggcacattctgtataaaaaatcaataaggttaattcaactttgtacaaggtgtgcaatgctgtccctcgcatttgtgcagtttgatttgcgtgcaaagcagcaaaaccgaaaataccgataattcccggcacaagtcagaaaagaccggaaattatcgtaccgctttgtaactttttatacgacgcaagtggagaatttgcaagttggatacaagaacgaagcggcggaaacgttcccgaaaaatgctccggcactgcattctgaacagccgtgatgcgggagctgctgcgcaaaaaggcgaagcgggcaccgcattgcgccgcagatagagccaagtcaacggggcaggggagctgctgcccccaaagcgcagcaaaaaagcgctcccaccttgtcatcggtgagagcgctttgctgattgctgattattttgatcgggttggttttttaaaaattagtcgctgacgtagggcatcagagcaacgtgacgagcacgcttgatggcgatggtcagtgcgcgctgatggtaagcgcaggtgccggtcacacggcggggaatgatcttagcacgctcagagacgtacttacgcagacggggcacgtccttgtaatcgatggtgtcgatgcgatcgacacagaagctgcaaaccttcttgcggccgcgacgcatggggcgtgcggggcgagagccttcggttctttcaaaagccattgcttattacctcctattggatttttaacggatggaccgtttcgtgtcagaacggcaggtcatcgctgtcgtcaataacggcgaagtcgtctgcattaccggcagaatagctgggagctgcctccacggcggccgggcgggcaggcgctgcgttctggtaggacggagcggcattctgatagccgtttccgttgcctgcattgctgcttttggggcctgcaaagttgatgttgtttgccacaacctctactgcggtgcggttgttgccgttcttatcctgatactgacgggtctgcagactgccttcaatggcgatcaggctgcccttctggaaatacttgctcacaaactccgcctgctgacgccatgcaacgatatcaatgaaatcggcctgacgctgctcgccctgacgcgcaaaattgcggtcgcaggcaatgcggaagctgcacacattggttccctgcgtagtggtacgcagttccgggtctgccacaaggcggcccatgatagcaacaacattcaacatagtacggtctccctttctgtcacagaagaattactcctcgtgagcaatgatcaggctgcgcataacgccttcagtgatcttgtacacacggtccagctcagcggggaagctgggctcgctggtgaagttgatcacggtgtagacgccctcttcctcgtcgttgatggggtaggccagacggcgcttgccccactcgtcgatagaatcgatcgtaccgttagcctcgatcagggacttgaacttacccaccagagcggcggaagcctcctcatcgagagcggcgctggtaatcagcatggtttcgtactttgccatttttgtagcacctccttttggacttgagggccctgcggatctgcaaggccaagggtacacaggctgcggcatcgcggcctgtgcggcgtgtctgttcagacagcaatttattatagcaagcttcttcgcttctgtcaagcttttttgacaaaaagtgcgataaaaaatgttttgcattttttggtaaaaaggactataatgtaaacgctttcctgcagtatggcagggccggggctccggcagtggcagggaagtgggaaaaattaaaggaggataatccatgtattcgttgtttcgagatctggcgatcataatcctgagcgcgaaattcttcggactggtggcgcgtaagtgcaaggctccgcaggtggtgggtgagatcatcgccggcctgctcatcggtccctgcttgctgaatctggtgcagatcagcgactccatctccatctttgcagagatcggcgttgtgatgctcatgttcaccaccggcctcggcaccaacctgaaagagctgatcaaggcaggccccatcgccaccctgatcgccaccgttggtgtggctgtgcctttggtgggcggcaccttattatatggtgcgttctacggctttgccgcagtgggcagcccggagttctaccgtgcgctgttcatcggcactatcatgaccgccaccagcgtgtccatcacggtggctaccctgcaggagcttggacacctgaagagctttctgggcaccaccatcgtcagcgccgctgtcattgatgatgtcatcggcatcgtggtgctcacctgcgtgctgggtgccagcagcggtaccggtacgggtctgggcaaggtgctgttcaacaccctgctgttctttgccaccgcattgggcgtgggtcttgtagtgcactacgccatgaagtggctggatcagcgcaatccccatacccagcgcatcaccatcgtgagtatggcgttctgctttgctatggcttacattgcagaggaatacttcggcatcgccgatatcaccggcgcttacattgcaggcatcgtgctgtgcaccatggatgacgcaccctatgtggagcgccgggtggatatcagcaactacgttatctttgctccgatcttctttgcgtccatcggtctcaagaccgatatcagcggcctgactccggagatcttactgttctgcgtctgcttcgtggtggtggcactgatcaccaagatcatcggctgcggtctggctgcaaagatctgccgcttcaactgggacgattccctgaaggtcggcgtcggtatgatgacccgcggcgaagtggcactgatcgtggcacagaagggcctggctatcggcgtggtagacccggtctacttcaccgctgtgatcctgctgatcgtggtgtccagcgtggccaccccgctggcgctcaaggccatgtttaccaagcacccgcccgtgctgcatcccagtcaggcaaaataaatcagatttgtatttggggttcagaaacgtctgcgggcgtttctgaacccttttttcatctgagtatatgcaaaaacggggctgctgcacatggtttcgtgcagcagccccgtttttatcatttgcgcagcatatttacagcgttttgcagaactccttcaggtaggcgcggaactcctcgccgatctcggggtgctgcagtgccagctccacctgagcctccacgaccttgagcttgttgcccatatcgtagtgcttgccggtaaactccacagcggtcatgccgccgcgggtgcgggcatactctgccatagcatcggtcagctggatctcgccgccggcaccgggcttggtgtgggcaaggatctcatagatctccggggtcagcagcacgcggcccagaatggaataattgctgaactcctgccccttcttgggcttctcgatcatatcatccacaaagaagtagttgtcgtggaggggagtggtctttaagctgcaatagcggctcacgtcctcccaaggcacagcggatacgccggcagccgggcggccgaactcctcgtaggcgcggatcagctgggcgcagaccggatcctcgccccagatcacgtcgtcgccgtagatgaccacaaagggatcatcgccggtaaaggctttggcggtgttgactgcgtgacccagacccagcgtctccttctggcgcacgaacagaatgttggccatatttgcaatgcccagacactcctccagcattttttccttgccgggcttagccagcttttcctccagctcggggctgcggtcaaagtgatcctcaataatgctctggttgcggcccagaatgatcaggatatcggtaatgccggagcggacggcctcctccaccaaatactgaatggcgggcttgtctacgaggggcagcattcccttgggcattgccttggtagcgggcagcacacgggtgccaagacccgcagccggaataacggccttggtgacttttttcataatgattctcccatattctcattttatgcacggcgaaccgcgcttttcagcaggatccccatcctgcgtgaaccatggtcagataaaggtgcctaccagtgcgttcaggtccggccccagcagcatggagcaaaggctgcctacgatcatcagcaggatgaacgcgccaatgcaggctgcaatgctgacaccgccctgtgcgttcagcacagcgcggcgctgctccggatccgggaactcggcacggatgcggcggatgcgtgccgcagcgctgcggcggtagaaccatttgccgtacagcccccgcaccagcatcagtgcaaagctgaggaaagacatgatgcggctcagcgccaccagtgcggaagcactgatgccggcggtcagcgggctgccggtggtctgcatcatactgatcaaagtaggaacgaacagcagcagctctgcggccagaaagccgaaggcgggcttccacgccttgcggtagaaaaagtagaacgggccgaacagcagcgccgaaaagctcatggagatcttggaatggcgcagctgcatttggctgtaatcattcagatagaccggtgcagccgtgccgatataatccacccagtcctgataagggacaccatcgatcagctcgtccttgccaaaggccgcgcgcacgttgcggtgcaccgggtcgatgactttttcggtaaagctgcggtacatttcgtcccggtacatcccgctgtaatcaaaatcccggttctgctcggcgctggcggcagcgcggtcgttgggctgctctgcgctctcggggggcagggcagcgccgcagcagcggcagacgctctcgctgcgcagggtacgctccccacaggcggggcaggtgcgcagctgggcatcctgataagggaacttccactcgtagcctgcgccatgggcaggggcgtggatgcacagacccattttttcgtaacaggtgcggtggtagggtgcaccgcagtccgggcagaccacgatgtcgtcctgaagggtcagcggcttgccgcagccctcacagggacagccataatatttcggcatgatatcctcctgtgaaatcgatcatactggtattatactcccccgggaatgaaaagaaaaggtgaaaatctttaaaaatccggcaagatagtatttttcctctttactttatcacagattctcggtatactaatgaagtatctgtgtataaactgtgtcttttggcggggctgaaaatgcacgccgccgggacattatctgctatgacggaaacccttgaacgagaggaacttagagaatgatcacgactgatgaactgaaggtgcagctggccgagcacgccaaggccgttaaggatctggaagaagcactggccattgaagcaagccgcaagcgcgtgcaggagctggagcacaccatgtcccgccccggcttttatgatgatgcagagctgagcaaaaaggtgtttgacgaggtcggcgacctgaagggcaagctgaaccgctttgaaaagctgcagggtctgtacgacgacgccgagaccatgctggaaatgctggacgaggagtacgaccccgccatgatccccgaagccgaggaggctgtgaatactgtgggcaaggctgtggaggagctgcagctgatgaccatgctgaacggcgagtacgaccacagcaacgccatccttaccttccacgcaggcaccggcggcaccgaagcacaggactgggccgagatgctgtaccgtatgtataataagtgggcacaggcacacggcatgaccgtggaggtgctggactatcaggatggcgacgaagccggcctgaagagcgcttctatgatggtcaagggcgccaacgcctacggcctgctcaagagcgagaacggcgtgcaccgtctggtgcgtgtctctccctttgacgccaacgcccgccgccagaccagctttgcttctctggaagtcatgccggagctggacaataccattcaggtggacatccgccccgaggatatcgagatgcaggtgtaccgctcctccggtgccggcggccagcacatcaataagacctcttccgctatccgtctgatccacaagcccaccggcgtcgtggtcagctgccagacccagcgcagccagttccagaaccgcgactacgccatggaaatgctgaaggcaaagctctaccagatcgccaagcagcagcacatggataagatcgatgacatcaagggcgtgcagaacgagatcgcatggggtcaccagatccgcagctatgtgttcatgccctacaccatggtcaaagatcaccgcaccaattacgagaccggcaacgtggacgccgtgatggatggcgatatcgatgagttcatcttcgcctacctcaaggccgccagccgcggcgagctgcaggacgcataagcgcccgctcttttacagatttggcagaaaggctgctgcacagtgttttgtgcagcggccctttttgcggtatgcgcggcaggggcagactgaaatcgggatatctcttgatttatcccctgaaaagcgtataataaaacagtacacaagacgttaaaggaggattcctgtatatggaacgcacctatatcaatgaggctcaaaaggccatcggcggcacggtgaaggtgcagggctttatcgagaacctgcgcaacagcaagtatatggcatttatcgtgctgaaggatattaccggcaagctgcagatcacggtggaaaaggccgaccaccccgaactggtggataccatcgaccagctcaccccggactctgtcatcaccgttaccggcaaggtgatggagaacgattacgtcaagatgggcggcgtggagatgatccccgaaagcatcgaggtggagagcaccgccgatgcactgcccatcgtccgcaaggagatcgcagccaccaagaaaaagaaggctgtggagcgctccagcatcgaccagcgcatcgactaccgctggatcgacctgcgcaccgacgagaaccagctgatgttcaaggcacagagctgctttgtcaacgccatgcgcaagttcctgctggactgcaacttcatcgagatccacacccccaagctgatcgctgctgccagcgagagcggctctgaggtgttcaaggtggactacttcgaccgcaacgcctatctggcacagagccctcagttctacaagcagatggctatggctgccggttttgagcgtatcttcgagaccggtcccgtgttccgcgccgagaagagctataccaacaagcacgctaccgagttctccggcttcgatctggagttcagctacatcacctccttcaaggacgtgatgaagatggaagaggagctgctgaccgccggtctgcaggccgttaaagataactacggcgagcagatcaaggagctgttcgggcaggaagtcatcgtgcccaccaccccgttcccggtggtcaagctggcagacctgtacaaggctctggaggaagagttcggctatactgtggacgagagcgagaagggcgacctgaccactgaagccgagcgtctgagctacgactgggtcaaaaagcactacggccacgagttcctgttcatcaccgattactctgccgagaagcgtgctttctaccatatgcgtgatgagaacggtgtgccgcagggctacgacctgatctggcgcggcgtggagatcaccaccggtgcccagcgtgagcaccgctacgaggtgctgaagaagcaggctgaggaaaagggtctggccgatgatgtcaagttctatctggagttcttccagtacggctgcccgccccacggcggcttcggtctgggcatcgaccgtctgaccatgctgctgtgcggcctgagcatcaaggatgccgagttcctgttccgtggccccaaccgcctgaccccgtgattttataaaacctttccgagagctgctatgtgttttgcatagcggctctttttttgagtcccgtgaaaaggcaattgaggaaaatcgcagattttcctcaattgcaattataaaattttttccgctgtctatgcccagagcaaagcggagggcatttaagatcgccccggcataataagcgctcccttttcatacgatacaacgagcacacccacccctacgggcgcggtgcgcagcgcaacaggaaggggagaaggaccttggagaaacaggaacagaacagcatctgtcgcgagatcggcgcacgcaccggcggggatatctacatcggtgtggtgggcccggtgcgcagcggcaaatccacctttatcaagcggttcatggagcagctggtgctgcccgccatgtccggctctgccgctgcccgggagcgtgcccgggacgagctgccgcagtcggcagcggggcgtaccatcatgaccactgagccaaaattcatcccggagaccgccgtgcctctgcagctggagggcggcggggcgtgccgggtgcggctgatcgactgcgtgggctacatggtggagggtgccatggggcacgaggaggacgcaaagccccgcatggtcaaaagcccgtggttcgagcaggaggtgccctttgaccttgccgcagagaccggcacccgcaaggtgatctgtgagcactccaccatcggggtagtggtcaccaccgacggctcggtcagcgacatcccccgggcgggctacgcagaggcggaaaggagggtcatcaccgaactggaagcgctgggcaagccctatatcatcctgctcaacagcacccacccggacgcgccggagacccggcagctggctgagggcatggcgcgggactaccgccgcaccgtgctgccggtgagctgtgtggacttggacgccgccatgctgggggagatcctgcggcgggtgctgtacgagttccctgtgcaggagctggattttgctctgccccgctgggtgaccatgctggaatccgggcactggctgcaaacgcaggtatacgcagccgctatgcagctggcagagcaggtgtcccgcatgaaggatctgcccgccggaacggacgctcctgcgctggaatgcgaggctgtgcagcgctcggcggtggcaggggcagaccttgccgccggcagtgtgcgggtgagcgtggagctgaagccggagatcttttatcaggtgctcagtgagcagaccgggctggacatcggggatgaagccgggctgatgccctgcatcatggagcttgcccgggcaaagcgcgcctacgagaaggtgcgcagcgccttggagcaggtggaagccaccggctacggcatcgtgatgccctccatcgacgagctgcatctggaaccgccggagatagtgcatcaggacgggcgctgcggcgtccggctgcaggcctgtgcgccctctatccagatgatgaaagccaccatccacacggagctcagccccatcgtgggcaccgagaagcagagcgaggacttggtgcagagcctgctggccgactttgcggacgacccggtgcagctgtgggagtccaacatctttggcaaaagcctgcacgagctggtgaacgacggcttgcagaacaagctgctccacatcccgcaggaagcccgcacccgcctgcaggaaacgctggaacgggtcatcaacgagggctgcaccgggctgatctgtatcctgatctagggtgtatctgaaaaaatccccgcccgccgtaagttctgcttgcggcgggcggggatcgttctgtcttatttttcttcctctgtcagcttgttgatcagcagctgatagatctcgttgcccttcaggatgaactgctttttcaccagttcggcgctcagccggtcgggcgcgcccagttccagacagaacagttcgctgtccagcccttttacggtgcagcgcacggtgcagtggccgtccgccttttcggtgatgcgtgcactgtacttggcctccttgcgggcccatgtctggcagcgcagcacggcagccaccgcccgctcccgcacgctgcggggcaggtcgtaggccagctcctgcgccaccttgcggcccttgtcagtaatggcatagctgtcgccggtcagggtgaccagctcctgctttgtgatatcgtccagacaggagccgatctcaaaatagttgacaagggcttcctccatcagggcgttctcaatctcctgccgggtaatgggaccggcgtttttcaccagataacacagcagcagccggatctcggtgctgctggtcaggccgccgggacggacaccggcggtaaaagcatcattggcgctcatcgttccttacatcccccttgcattttcacatggtatcaaaggtctgcaccgctgcggaaagggcgggcagcgggcagacaaaaactctttctattagtataaagactttcagcccggattgcaagccgcaacggcaaaatctgtctcaatgcgcttgggacattccggtgtggagtacacccaccggtccagatgcccctcggtgacaaagtaccgcagatcaaaccggtgaggctgacttagggcgtggttcacgatgaccagcttgatcttcatcttctccggcaaaatgtttttgatgtagacgcttaccgcctgcccgggagcaagaccgttgcagctttccgcaaggccggcaaggttcggcgcgatctctacaaaggtgccgtattcctccacgctgcgcacgatgcccaccaccgtttcgcctacggtgaaccgggcgacgttctctgcccatgtgcccagcagctcccggatggtcagcacaaagcgcccctgcgcgtcccggtttttgatggcgcacaagatctgctgccctacgcttacccggtcggcaggggaggagatgcggcttaccgacatacagtcgatgggcagcagggcgctgatgccgcagcctacgtcacaaaacgcgccgaacggctcgatgtgggtcactgtgcagggcaggatgtccccgggcgagagggtgtccagatactctgccttgcacagctgctgcgccttggcgcgggatagccggtagcagggcgcaccgtcctcgtccgtgtccagtccttcgatgacaaagcaggtggggcgtcccacccgggtcagcaccgcaatatcccgcacagtgccggtctcggcaccgtctgcgcactgggcaaagggcattaccgcctttacgccgcccagctcaaaccgcagctgccgccgggtgtcaaaggcaagggcggtggcctgcaaaatctcgccgctggccatggcagcccgcagttcggcaggggacaggcgggcggcagaacggtaactgttttcggtacgataagcttgcatcatgtttcattcctctttctatatagttttcgggtctctgtgcgatgctacaacgatatgcagcagtgtgcgcagatatttgcattttgtgcgactttgcattatactatatctgtatgcgcagcacccgctatgcgggcggcacacactggctctgtcgggcgtctgcgcggcagaaaagaagggagaggtcggataaatatggacatcgctgtgggagataccatcctcacccgcaaaaagcacccctgcggggcatccagcttcgaggtgctgcgggtgggcatggattttaagatccgctgcaccggctgcggacgcgaggtcatgctgccccgcgccaaaattgaaaagaacatcaaaaaggtggtaaagcccggcagcgcgcagtagcgcagccaacgcacccgaaccggaacgaatttgtaaggagaactgcaaggatgcaagatatttcttcccggatggatgcggtctgccgccgctttgaggagctttccatgcggctgaaccagcccgataccgccgccgacccggcactgttccgcaagctgatgcgggagtaccacgacaccgagccggtggtggaggcttaccgggactggcagaccgcgctggatcatctggcgcaggccaaagctctgctggaggagtccggaacacttgacccggacttcaagcagatgatacagcaggaaatcagcgaaaaaagtcaagatgtggcaaagctggaaaataatctcaaaattttgctgttgcccaaggacgtgaacgatggcaaaaacgtcatcatggagatccgcggcggtgccggcggcgaggaagccgctctgtttgcccacagtctgctgcggatgtacaccatgtacgcccagaaccgcggctggacgctggaagtgctcaacctgaacgagacggagcttggcggcgtaaaggaagccatcgtctcggtggacggcgcaggtgcgtataaccgcctcaagtacgagagcggggtgcaccgggtacagcgtgtgccggagaccgagacccaaggccgcatccacacctcaaccgccaccgtggcggtaatgccgcaggcagaggaggtagactttgcgctggacatgaaggatctgcgcattgacaccttccgctcctccggtgcgggcggtcagcacatcaacaagacctccagcgccatccgagtgacccatatccccacgggtacggtggtggagtgccagaacgagcgcagccagttccagaacaaggataaggcgctggagatcctgcgcagccgcctgcttgcgcaaaagcagaaggagcagcaggacgccatcaacgcccagcgtcaggggcaggtgggcaccggcgaccgcagcgaaaagatccgcacctataacttcccgcaggatcgctgcaccgaccaccgcatcggcttgaccgtccacaatctggaaaagatcatggacggtaatctggacgaggtgatcgacgcccttgccacccgcgagcagaccgaaaagctgcaaaagctgggtggataagcgccggttcagcagatgcagaatgaccgtaaaacgatagaaaagcctgacaagcaactatactttacagatagaaagaacgatgattcgtatggaaatcaaaaccagagttttgcctgccgatgaagcaggagtcgccgaagccgcgcagctgctgcggcagggacagcttgtagccctgcccaccgagacggtctacggcattgccgccgatgcccgcaacggcgcggcggtgcgcaatatctttgtagccaagggacgcccgcaggataaccccctcatcgtccacgtcacagggccggagatgctgccgggtcttgtcagcgaggtgccggagcgtgcccagctgctgatggcagctttctgccccggaccgctgaccatcatcatgccgcgcgggccggaagtagcggatgaatgctgcgccgggctggataccgtgggcatccgtatgcccagccacccggtggcgcgggcggtcatccagcagagcggctgcgcctttgccgcccccagcgccaacctttccggtaagcccagccccaccaacgcgcaggacgtgttcaccgatatggacggccgcctgccgctgatcttggacggcggcgagtgcgatgtgggtgtggagagcaccgtggtgtcggtggtgggggagaaacccaccctgttccgccccggccacatcacgctggaggatttggaacgcgccctcggcgaagaggtggaggtgtccaaggctattctggaaaagctgccggaaggtgccgtggtgcgcagcccgggcatgaagtataagcactacgcccccaaggccgatgtgaccctgctcaacggcacctttgagcagttcaaggcctatgtggacgcccataaaaacgagaaccccagctgcctgtgctttaccggcgaaagcgcaaagctggatgtgccctgcgtggaatacggccgcgagggggacggtgccgatcaggcaaagcacatcttccgctccctgcgggcgctggatgagcagggcgatggcgtggtctacgcccgctgcccgcagaaggatggcctgtccatggcggtgtacaaccgcctgatccgcgccgccgccttccgggtgatcgacctatgataactttaggcatcacggggcgcagcggctgcggcaagtccacggtcacggcggtatttgccgcccacggcgtgccgctggccgacgccgaccagctcagccgggaaattttgctgcccggctcgccgctgctgccgcagcttgcggcacggttcggcggggatattttaaagccggacggcacgctggatcgccgcctgctggctgaccgtgcctttgccaccccggagggcaaggccgcgctggacagcctgacccaccccgccatcgtggcgcgcatccgcgcggcaaagcaggcggcacaggccgccggcgcgcccctttttgtgctggacggtgcggtcatcgtgggcacggcggcgcaggccgagtgtgaccgcctgtgcgtggtcaccgcgccctttgagaccagtgtggcgcgcatcgtggcgcgggacggcatctcgccggagatggctgcccgccgcctgaacgcccagaccccggaacagaccctgaccgcacaggcggactacaccctgcacaacgacgccgggctggaggcgctgcaagccgcagccgcccgcctgtgtgagcggctgcaggcagaagggggcgtgacggcagcaccttgaacgaacaaaattatgaaaaagtctacgaccctatcgccgcccgggagcgccgcgccgcgcgggaaaaactgcatcgccgcaaacagcagcgccgccgtcagctggtgctgcggctggctgcgttgtgcttggctgtggtgcttacggtgtgtgccgtgccgcccctgtgcaaccgggcagagcagcttttgtacccccgcaagtacgagcagctggtggaaaaatgggcagccgcctacgagctggatccgcttttagtctacgcctttatccgcaccgaaagcggctttgatccgcaggctacctccagcgtggacgcccgcggcctgatgcagatgaccgaggaaacctttctctggatgcgcagcaagatcgccccggaggagccgctgacctttgccgacctctacagccccgacaccgccatccgctttggatgctattacctgcacctttgcatggtgcgctacaaaggggatgtatccacggcggcagcggcctaccacagcggctggggcacggtggatcagctgctgcaaatggaggaacactccgcagacggggagaccctgcagggcttcccctataaccagatgcaccactacgtcaacaagatcaccgcctgctaccagacctatcagcgtctgtacgcaggtcaatgataaaaagttaaggagcaaaaaatcatgagtgagaaacttactgcaaaagagtacgccgaaaagctgctctacacccccgaatacgctgccgacaagcaggcagatgtaaaggaaaaggctgctgcctttgccgagggctacaagaaatttatggacagcgccaagaccgagcgcgaggctgccgttgtcagcgagcagatgctgctggctgccggctacaaggcttttgagcccaaaaaggcttatgcccccggcgagaaggtctacttcattcaggagaacaaggccgttgtggcggctaccatcggtcagaagccctatgaggagggcttccgtctggtcatcgcccacatcgactgccctcgtctggacctgcgtcccaaccccctgtacgagtctgaccacatgagctacttccgcacccactactacggcggtgtgcgcaagtaccagtgggctaccatcccgctggctatccacggcgtgttcacccgcgccgacggttccagcgtcaactttgccatcggtgaggacgagaacgatcccgtgttctgcatcaccgacctgctgccccatctgggtgccgagcagaacgagcgcaagctcagcgagggcatcaagggcgaggagctgaacgtgctcatcggctctgacaccgtggaggaagaggacgtcaaggaggctgtcaagctgaacaccctcattctgctgaatcagaagtacggcatcaccgagcgcgacttcacccgcgccgagatcgaggtcgtgcccgctgccaaggcacgcgatgtgggctttgaccgctccatgatcggtgcctacggccacgatgaccgcgtggatgcttaccccgcactgctggccgagatcgagaccaaggaccccgtgcacaccaccatctgcgtgctgaccgataaggaagagatcggctccgacggcgtgaccggtatgcagagtatgtatgtgttccactttatgcagctgctctgccgcgctgccggtcaggacgatatcctggccttccgcaacagcgtgtgcctgtctgcggacgtgaccgccgccttcgaccccagctgggcaagcgcctttgagaagcaaaacggcacctacgcaggccgcggcattgccatcttcaagtacaccggcagccgcggcaagagctctgccagcgatgccaacgccgagctgctgggcgacatcacccggatgctggatgccaacaacgtggcatggcagatcggcgagatgggccgtctggatctgggcggcggcggcaccattgccaagtatgtggcaaaccgcggcatcaaggtgctggatatgggtgtgcctgtgctgtccatgcactctccctttgaggtcatccacaagaccgacctgtacatggcttaccgcaccttctctgtgttctgccagtctgctgactgatcccccgcgctgacggatattttgcattgaaaaaccgagctgcctgcacatttttgtgcggcggctcggttttttgcgcaaaagccttgaccttcaaccggctttaaggtgtaatgtaagggcggaggtgaagcaaatgaacatcaaacaggcttctgaacaaagcggtgtgtccgccccgaacatccgcttttatgaaaaagaagggcttctcacaccggcacgcaggcagggcaatgactaccgcgattacaccgccggggatgtccgcacgcttaaacttatccgtatgctgcggatgctggatgtgccgctgcctaccatcaaggcggtactgcgcggggaacagcccctgcaacaggcgctgcaagcccagcagatcgtgctggagcagcaggcggcgcagctggcggcagccatgcagttctgcgccgaccttgcccggcaggctccgcagacggacacgctggacgtggacgcctgtctgacccgcatggaaagccccgccccgcagcaggggttcttctccggctggctgcaggattactgcacgctggcgcaggtgcagcatcagaagcactttttctttatcccgcagggcagcatcaacaccccgcaggagtttacagcggcgttgcaggcttatgcagaggaaaaggaattacagttcaccctgaccaaagagggaatgtacccggagttctcgctggacggcatcgcgtataaggcctaccgcaacccgggcaaataccgggacgagatctgctgcgatgccctgcaccccgagcagctggacgcaggactgccgccccggcgggagaaactgctgcgcatcctgcgcatcgctgtgccgccggtgtgcacctttgctgccattctggcggcagggtgggtggtgactggcggagcaggctggctctggcttgcagtgctggcctctgccggggtgctgctgggacgctgctttgaaaagtggctataaggcgcgttaccccaacggcagcgcctcggctacggtcaaaaaggcatagccgttgtccgcataccaccggatgatatccggcagtgcctcggcggtggtgcgggtggtggcagagtcgtgcatcagcaccacgcaatgggtctgctcgccggtctcccgcaccacattgcggtagatggtatccgcactggggtgcccacccacggcgtcctcggcgcagacgttccagtccacccactgccagccgcgctgctctacctcggtttttagctgttgcatcagccccttgccgccgtaacggcggctcacggtgttggtgctgccgccgggaaagcgcaggtaccggatgttctcggcgtccacatagggggcaatgcgctccttcagcagggcgatatccttccagtaggcggcgctgctgcggtagatgtcgctgtattcgtgggaggcagagtgcagcgcgatctggtgcccggcggcagcggcctgcgtgagcaggggcagatatttctcgttgtagccggtagctaccacaaaaaaggtgccgtgcaccacggcggcatccagagccgccagcactgccggagtggtcttgctggggccgtcatcaaaggtcaggcagacccatttttccggcagggaaggtgctgcgggcgtaccggcatcggatgcagccaccaccggtgcggcaggggaaaagggcgaaaaatccggcgcagcggtcagctcgctcagcttgcagcccgccggtgcgcgtaccggtaccagccaccccgccgcaaacgctgccagtgctgctgccagcagcccgccccatagtccgatgcgcccgccggtgcgccgcacaaaaagtttcatacacgaaccccctcctttgctctgggcgcagcgccgcaaacaggctttccgcgcacaaatgacctgtgaaattgcccggaaagctgcctttgcgcgcactctgcgctgctattatagatatgaaacttaaaaaaacttatgagaaacaaagaaaccacttgacgaattgccggaaatgtgttactatatgcaagcagtccgcaccaacggttttctacctcaaaaaccggagaactgtacaacaggtatgcgagggtggcggaactggcagacgcgcacgtttgaggtgcgtgtggtttatccttgggggttcgagtcccctccctcgcaccagaaggcaagtcggtttttgacttgccttttttctatgagcagaagtggtggaatggcagacacgctggttttaggcaccagttcctagtgagtgagggttcaagtcccttcttctgcaccagctaaaagacccgcagcagccctgaaaggttcaggtgcggcctgcgggtcttttgctttttatgtgcgctgaaaagcggcagagaaaaatggcacgaaacgccctttaaatgacacgaaacgccccgggaatgtgttgaccggcttttttcagaatggtataattttaagggaaaggtgtcattttatgcggaaactgacacacggtatttgtgcatattttaaagctttgtgcgcctggctttgatgtaaggatcagggaaagcgtatacgggaagaaacttggctgaggggcagtcagggggaaacagccttatgatgaagaaacgaaaaaatatcctgctcatagcggggatgctgctggtgctgctggtcggcatccttgcttacagtgcctatacccagaaggagatctatcaggaaagcacggcaaatctgctttccacctatgggcagtctgccaagacctttaccatgtttgcgcagcgcaactggaacatcctgaccgactgggacagctatctgggcacccttgcggagcggggagagcaggaggggcagtggcaggagtatatcgcccaaaaggctacctggcagtacactgatttttacctgttcaacgagcagtgcgagttttggaccaccgccgggcggcagggcacggcagagcatatgagggcaacttttgaggagctgtatactgcaaatgctccggtgatcaccagctacacctccagtcagggcgtccgtaagatcatgtttgccatgcctatggaacagcccttgcagctgggtgacaccacctatacggcgctggcggtcagctacgacaacgccgtgctggaaaagctgctgggcagcatggtctatgagggacagagcgattgctatatcgtgcgttcaaacggtgatgtggtactttccaccgagacaaagaccgagatcaccgagcagatgaccaacctgtttgattacttgcagcagaacgccagcgtggatcagccctactatgacaccatggtgcagaccctgccgcagggcggcgagggctgtgtgctgttcaccatgaacgggcagaaatattacctgatctatcagccgctgagcattctggattggagcatcatcggcatcgtgcccaccggggtggtggatgccgggatgcgcagtgtgcaaaacgctaccattttagtcattgcgctgctggggcttttgatcatggcaggcgtggtaaagatccagcgtgacgcggagcgcaaccgccgccgggagctggagcgccgccgggaaaagagtgatatgatgtttgcgggcatggcgcgcgttgtggagcgttttgcagtgtgtgatctggaccgcgaccgttaccagtactacgagcggcacggagaagcattgtacccgccggagggctcttaccagcagctgctggagcagatatcgcgcaagtatgtggtgctgaccgacagcgaaaacgccaagatcccccagatgctggccccggagaacctgcgcaggctgatcaaaacggacaacgactccctcaagctcgaatacgccgcccgcgataaaagcgcatttttcatgatgacggtggttcccatggcgtggaaggacgaccgcctgacccgcgtgatgatgatcgtgcaggatatgggagagcagcacctgctgcaaagccttgccaacaccgatggcctgaccggcctgctgaacaagcgctattttgaccgggtgctgacagtgctggaacagcactgccagccctttgcgctgttctatatggacttggaccgcttcaagccggtcaacgatacctacggtcatgatgtgggcgatgagctgctgaagggcgttgcccagcggctgcagggatgcatccgcagccgggactacgctttccgtctgggcggcgacgagttcgccctgctgctgctcggttcgatgacgcaggagacctgcgcccgcaagatggacatgatctgtgagatgatcgccgtgccctacgagatcgacggtaacgccgtaagcgtaggtgccagctgcggctatgccttgtaccccgccgaaagcattgatgtacagcaggtgtgctacatcgccgatcagcggatgtacgagaataagcagaaaaaccacgccagacaggacggcgcggaaggcatttaaaattgtcttacacaaagcaaggccgcagcacggtatttgtgctgcggccttgcccgttatattatgctgttacagatgcagcatatcccgctgggcggcagcgcggtagcgcagcgcagcggcgataaagcccttgaacaggggatgtgcgcggttggggcggctcttgaactccgggtggaactgtgcacccagatggaagtcgcggccgggcagctccacagtctccaccagatggccgtccgggcttgtgccggaaatgaccagcccggcgtcctgcatctcctgccggaagtcgttgttgaattcatagcggtggcggtggcgctcccagatctcgctctcgccgtaacactcggccatcttggtgccgggcgccactgtgcagggatacttgcccaggcgcatggtgccgcccttggggatgttgccctgctgatccggcatcagggagatgacgttgtgggcaccgtccggggtgaactcgctggaattggcgtccttgtagcccagcacattgcgggcaaattcaatgaccatgatctgcataccaaggcagatgccaaagcagggcacatggttctcgcgggcgtactgggcggcttggatcatgccctcgatgccgcggtcgccaaagccgccgggcacgatgatgccgtccacgtctgcaaaagcttccttgcaggcagcctgatcggtcagatcctcgctttccacccagcggatctccacctgactgtcgttctcaaacccggcgtggtacaagctttccatcaccgagaggtatgcatcgtgcagcttgacgtacttgcccaccagtgcaatggtgcaggtcttgctgcgggtggcaatgcgggagactacctgcttccactcggtcaggtcggcggggggaacatccagatgcagctgctgcaccaccacatcgtccagaccgttggtgtgcagcatcagcgggcactggtagaggctgggcatggtcaggttctcgatgacgcactccggcttgacgttgcagaaggtgctgatcttgcggcggatatcgctgcccacgctgccgtctgcgcgcaggatgatgatgtcggggcttacgcccatgccctgcagctccttgaccgagtgctgggcgggcttggatttgtattcgtccgagccggagatgtagggcaccagcaccacatggatgaagcagcagttctcccgtccctgctccagacccacctgacggatggcctcaaggaagggctgactctcgatgtcgccggtggtgccgccgatctcggtaatgaccacgtccgcctcggtggaggaggccagattgtagatgtagctcttgatctcgttggtgatgtgggggatgatttgcaccgtctgccccagataagcgccctgacgctccttgttcagcacgttccagtataccttgccggtggtcaggttggagtatttgttcaggttttcgtcgatgaaacgctcgtaatgacccagatccagatcggtctcggtgccgtcatcggtcacgaacacttcgccgtgctgcagcgggctcatggtgcccgggtccacgttcacatagggatccagtttctggctggccaccttcaggccgcggcacttcaaaagccgacccagagatgcagcagtaatgcctttgcccagaccggagaccacgccgccggtcacaaaaataaattttgccataaaaatataccttcctctgtcgtaaaataaaactctcctataaaaggctcactcccggcgcacccctttcccggcgggtgcggggcgaagccctgcttattattcgcttctgtcagcgtactcctccagcacctcctgcgccacctcggcgcggtcgcggcgggtgtccatggcctgtttttcaaggtagcggtgcgcttcggcttcggtcatgtgggcgtgctctaccagacagcactttgcccggctgaccagccgcagctgcccgatcttgtcctgcaggcgggcattctcctgccgcagacgctgcagacggtggttgccggcagccgccatgtgcatggcctgcaaaaacaacggggtggtgaagggcttgctcagcagcagcaccccttgctcgttcaagggggcaagcaattgctcagcctgtgcggcctttaccagaaagaccacaccggcatcggtctgctccacagcggtgatgcacagttcgtgcccgaactcatcgggcaggggagcgttgaccacgatcaactcaaaatcagattccgacattctgcgccgcgcttcggctccgctgggaatgatcaccgggcggctgtaacccatctcggacagtcgcgcggcgatatactcgttggagttggcaccggcgcttacgatcagtgcgcgtcccatttttcgcactcctttctcctgcgctggcagggatcagatggcgttgaaatagtagacgcgctcgtgctcggcctggtcaggcgcattccgcaatgcggcgcagcgcttgagttcctccgagaaatagcgcttagaaagcccctccggcagcactttgcgcaaaaactcgctctcctcggctacctgcaccgcctcctcaagggtggcgggcagggtctcaaggcccagtccttcggcctcggcggcatcgaacaggttgcggttcaccggcgggggcaagaccatgcgcttttcaatgccgtccagtccggcggcaaggatcaggccgatggccagatacgggttgcaggcggggtctgggctgcgcagctccatgcggcagctgtcgcccttgaccatggggatgcgaaccagctggctgcggttctggcggctccagctcacatagcggggcgcttcgtcacagccaaagcgctggtagctgttgggcaggggattggtgaacacggtcagctcccggctgtgtgccaacacacctgccataaagctgcctgctacgctgtccggggcaatatcgccctcaaacaggtttttgccgtccatgtaaagcgagaggttgatgtgcagcccgctgccggcctgcaggggcaggggcttgggcagaaagctggcgtgcaggccgttgcgcatggcaatggcacggacgatctgcttaaaggtcattacgttgtcggcggttttcagcggccctgcgtagcggcagtcgatctcgttctggccattgccgctttcgtggtggctgtgctggggtgccatacccatctgctccatggtcaggcagatatcccggcgcaggttctcgcccgcatccagcggtgctacgtcaaaatatccgccaaagtcgatgggaatgcaggtagggtggccacggtcgtccttttcaaacagataaaactcgcactcggtacccacgttgcaggtaagccccagctttttgaatttgcggttcatatcccgcaaaaagccccggcagttgccgctaaaggctgcgccgtccggcttttccacatcgcagaagaactgcatcactcggccttcggtgggacgccacggcaggatggtcacggtggaaagatccggccgcagtacaaggtcgctctcctcaacgtgcataaagcccgcaatggaactgccgtcaaagcacacgccttcttccagagccttggacagattgctggccagcacggcaatgttcttctgggtgccaaaaatatcacagaaggcaaagcgcacaaatttgacgttgttgtcctccacgaaatccagaatatcctgttgggtggaatagctcataaataaccccccttacaaaaaattcatttcaagtaaaacgcccaaaggcctgccctcaaaaagggagcaggtctttgggctggtgtaagaaataggaaaaggagaatggctaattgatccggcagccggcggatgcttattttttacgcggtcaggagattatcagacgtagtaaagcatcttgctgtagctgggcagaggccagtaatcctcgccgcagatggtctcggcatcgtcggcagcggcgcgcagggcgtccatcaccgggagaacgttatcgtggaaggcaacagccttctcgctctcggtgggcagtgccttggcggcattcacggcatcctgcagggtgtcgatggcatcgctcatggcatcggcgtcagaagaaagcttttccaaagtcttggtctcgctgcgcacgctgatgtgctcgctgacagccagcttggaggcggcggtgttggcaacctcgctcatgtaggcgttgatggcgggcagcagctgcttgcgggccatctccagcatggtcagagcctcgatgttgatgatcttggagtaatgctccatctcgacctcgtagcggctctccatctccaccttggtcagcacgccgaactcttccatcagggcgatgttcttgggctcgaccagtgcgggcagagcagcgggggtattcttcttgttgggcaggccgcgcttggctgcctcggcctcccactcggcggtgtagccgttgccgttgaagataacgcggcgatggtcacggatggtgcgcttgaccagagcgatggctgcgctggtaaagtcttcagcgccctccagctcatcggcgtagcccttcagttccttggcgacagcagtgttcaggatggtgttgcagtcgctcaggttctcggcagagccgggcatacggaactcgaacttgttgccggtgaaggcgaagggggaggtacggttgcggtcggtggtgtccttgctgaacttgggcagaacatccacgcccagatccatcttcatcttgacggggccggcatagggagaatcggatgcaatagcatcgataacagcttccagctcctcgcccacgaagatggagatgatggccggaggtgcttcgtttgcgcccagacggtgatcgttgcccggggtagccacagaggtgcgcagcagatcggcgtactcatccacagccttgatgacagcggccaggaagatcaggaactgcaggttctccatgggggtgtcgccggggtccagcaggttctcgtgggtggtgctcatggaccagttgttgtgcttgccgctgccgttcacgccttcaaagggcttctcatgctgcaggcagaccagaccatacttgggtgcgatcttgcgcatcatttccatggtcagcaggttgtggtcgatggctacgttggtggtgtcgaagatgggagcaagctcgtgctggcagggagcaacctcgttgtgcttggtcttggcaggcacgcccagcttccacagctcctcgtccagttccttcatgaacgcagaaacctcgggacggatgacaccgaagtagtgctcctccagctcctgacccttggcagagggagcaccgaacagggtgcggccggtaaggatcagatcctgacgtgcctcgtagtcctcctttttgaccaggaagtactcctgctcggggccgacggtggtggaaacgtagtccacatccttgccgaacagcttcaggatacggacggcctgaccggacagtgcgttcatggaacgcagcaggggagtctttttatccagagcctcgccggtgtagctgacgaatgcggtggggatgcacagcacgtcatccttcacaaaggcgtagctggtggggtcccatgcggtgtagccgcgtgcttcgcaggtagcgcgcagaccgccggaggggaaggaggaagcatcgggctcaccgcgtaccagctccttgccggagaactccatgatggcggtaccgtcgcccacagggctgacgaagccatcgtgcttctcactggtgatgccggtcaggggctggaaccagtgggtgtagtgggtagcacccagctccatagcccagcgcttcatcacgctggcgacaacgtttgccacctcaatatccagcggagcacccttgtgcagggtgttcttcaggctcttgtaggtagcgctgggcaggcgctccttcataacgtgctcattaaagaccttgctgccgtagatctccataacatttgctgccataaatcctactccttacttgatcttacttttttctttcgccttgggtctgccgcaatgcaaaaacccaaagcgtgcttacatcttaacaaaaacggcgctgcgagtcaggaggtgacccacagcgccgttgctgtctatggctaagattatagtccttgcgggcaaaaaaggcaattgacaaaactgacgattctgcacaaacacgatctcggatttttggaataaccgcgattggtatgacttttgcatcgaaaaagcccccttcaggacggctttctccggctgaaaggtgcgcagcgtgcggcgattgttcttattgtaaaagcatcagatgacctgaaacaggaaaaacttgaggtagttcgtctccggcacgccccacagaatggggtgatccggtgcctgctgctttacctcgatctgccgcagctgccggtgagcgtccttggcggcggcgcgcagcatcttgatgaacaactcctcggtggcaaagtgggagcagctggcagtagccagatacccgccccggggcagcagcttcatggcgcggtagttgatctccttgtagccgcgcatggcattctccaccgtgcggcgcgccttggtaaaggcagggggatccagaatgatgaagtcgtaggggctgccctccttttccagccggggcagcagggcaaaggtgtcctcgcagaggaaatccatgttgtcgaggccgttgcgttcggcgttgcgctttgccatggcaatggcctcggcgctgatgtcggcagcagtcacccgggctgccccgcccttggccgcgttcaaggcaaagctgccggtgtgggtaaagcagtccagcacggtgtgcccggcggcaaggcgtgctaccgcccgacgattatatttctggtcaaggaaaaatccggtcttttgcccgttttcaaagtccacatggtagtacacgccgttttcacagatctcggtctgggtggtttccgggtggctctcgccgggcagggcgaaccagcccttgttttgttccagcccctccttggcgcgcagggcttcgtcgttgcgctcatagatgccgtcaatggtctgtccgtccgcccgcagtacctcagccagcagggggaagagcactggcttcagcttttccatgcctacgctcagggtctgggtgaccagaacattgttgaaccggtctaccgtcaggccggggaactggtctgcctcgccaaaaatgaagcggcaggcggaaaagtcggcaggctccagcaccgttttgcggtacgcccatgcgtactccacccggcgccgccagaaggcagtatcaaaggtatcgttggcgttgcgggagatcagccgcacccggatcttgctttgcagcgagagaaaaccggtgccgagataggcgcccttggggctgaccacatccaccagcgtgccgttttccggctcggtgccgggggcttccagaatgtcgttctcgtacacccaggggtgcccgcccaccaaaagcccttcggcgtgcttgttgactttatatacaggataagtgcgttcgcttttcataaaatgctccttcaacaaagaatgcgcaaaatgatgcttgttctgctctttatcataacatgaaaatatggtagaataaatacaaaattttgcggaaggaagaaaacgctatggagatcgaacgcaaatggatggtgaccggctggccggaggggctgccccttgaggaagagttcaccatgcggcagggctatatcagcgtgcagcccacggtgcgcatccgggaggaagcgctgaccggcggcagcaccgactatatcctctgcttcaagtccgcaggggggttggcgcgggaggagatcgagcgcagcatcgacaaagacctgtttgtgcagctggaggaaaagatcattggcaagcccctgatcaaaaaggtgcgccggagctatcgcctgccggacggcgcggtgctggaggtgaaccatgtggacgagggcttgcccacagcgttctggtacgccgaggtggagtaccccacagtggaagccgcgctcagctggcagccggaagcctgcggccttgcggcatacctcaacgatgaagtaacgaaccagcccggccagagcatgggcgcatactgggtgcaaaccagagggtaaagccgataatactgtgaagggaatgactgtttacgaaaaagatcaagctgaagctggagctccagtataactcgccggtgattcttaccttttttctgttgtccatgctggtactgctggcagacggctggacgaacggctggagcaccatgaacctgttctgcgtgtaccgctcttcgtggcgggacccactgggctacatccggctgttcggccatgtgctgggccatgcaaactgggagcattttctcaacaatatgctgctgctgttggtggtgggcccgcccatggaggagaaatacggcagcatcccgctgctcaagggtattttgtttaccgcgctggtcaccggcgtgctgcaatgcatcctgttcccccacacggggctgttgggtgcgtccggcatcgtgttcatgctcatcatgctgtcctcgctggcgggcttttccggcggcatcccggtcaccatgctgctggtggcggcactgtactttggccagcaggtgtacgatatcatctttgtgcacgataacgtggcaaactttatgcacatcgtgggcggcttgtgcggcaccgccttcggctattactgtgccctccaccgccgcccggcgcgcagccgcagataaaagagaaaaattatagatgaaaacgggataccggagcgtctgcggacgctccggtatcccgtttatacaagaaagaaaaataatgagtgcgacaaactggaagctgcgaaactaacgagtcattctgatttattcaggaaattttacagacggttggtcctcatgatgttttccgataatcttttccatccaaatcatgttgtaccaacgtccaaatttataaccgcatttataaaattccccaacttttgaaaaacccaaatgtgcatgaaattctgcgctgttgctgttaaggtattcatcttcaactctcggataaccaatacaagcatacaagttcaaaattcccatttcactcaatctattttcaagtgcctcatatatctttcttcccaaaccgcatttttgagcagtatggtcaagatataccgtcagttcacatgaccaatcataagccgccctgcctacaaaagcacctgcatacgcatagccttgaattgctccgtctttttcaataacaagataggggtatcttttcatagtcatttccatacgcttttgaaaatccatgagtgttggaacgacatattcaaatgtaatggcagtattctcaacataataagcataaatatctaaaatacgttcagcatcttcaagctttgcatctcttactaatatatccataactgttcctccgtcaattccgatttgttgaactaagccgagtataccataccagccaatgaaagaatacccctctaggggagaattggttaaaaaaagcgttcaaagtgcgccgcagagcactttgaacgcgaacaataaaaatattatttccatccccggtcggtggggtccagcatcccggcggcggaatacaccagcgcgttgcagatggcagcggcaacattgctgccgcccttgcgccccatggcaacgatagcgggcacaccgtgggcggtgcagacgctgaacagccgctccttgctctccaccacgttcacaaagcccaccggcaccccgatgaccagcgcagggcgcagcccggcggtttcgatcaggtcggcaatggtcagcagcgctgtgggtgcattgcccaccgcaagaatggcaccggggtgctcggcggcggctctttgcatggacgccaccgcccgggtggtgccgttggcttttgccagcgcagccacctccgggtcggccatgtagcacagtgccgtgccgtccagccgcgcaagccccggctttgtaatgccggaaagcgccatgttggtgtcggtaacaatgggtgcagcggcttgcaacgccgccacgcccgccgccaccgcaccgggggtaaagcgcaggttgcgggcgtagtcgaaatctgcggtggtgtggatcactcgcttgaccacggcggcagtctccggcggcggggtcagacccattgtttccagctctgcggtgatgatagaaaggctcgtccgctcaatgtcggcgggcagatggtgttgcggggtcatacggtgctcctcccttccagtcccatggcggcgtacagggcgttcatgtccagcgcccggcgcacgccgtcggccagcaggtcaaactgctgctgacggtactcctgcatggagagcagcggcgcactggcaggggagatgcccttacggctgcacagcaactgcaccagtttttcggtcagctccccggtatcaaacaggccgtgcagataagtgcccgccacgttgccctgcacgcagccatcggcgctgccgtctgcaaggcggcagaagggcacaccctgcacggtagtgcgcccggtatggatctggtaaccggtcagcactgcccccgccagctgcggcgcggtgacggtggcggtgtcctgtgtgcggtgctttgcgtccgtaaatacagtctgaatgggtagcagccccagcccgcgcacggtctggctgcgtccgctctcagtgccctcggggtcggcaagggtctcgcccagcatctggtaaccgccgcacacgcccagagccggcgtgccggaggttgccagcttctgtaccgcagcttccaacccgcactgccgcagccagagcagatcatctatggtgttttttgtacccggcagaatgaccacgtccggcgcacccagctgtcgggggctttgcacataccgcacgctcagcagcgggtgctgctccaacggcataaaatccgtaaaattggagatatgcggcagccgcagaatggcagcgtccagcggcttaatggcggtgttgctttccagccgggaggagagggagtcctcgtcctcgatatctacccgcaggtagggcacaacgcccagcaccggcagatgggtcttttcctccagcatggtaaggccgggtttcaggatggcggcatcgccccggaacttgttgatgaccagccccttgatgcgtgcccgctcggcgggttccagcagctctaccgtgccgtacagctgcgcaaacacgccgcctcggtcgatatctcccgccagcagcaccggtgcatccaccagctttgccagccccatgttgacgatatcgtccgcttttaagttgatctctgccgggctgcctgcgccctcaataacgatgatgtctacctcttcggacagactgttgtaggcggctaaaatgtccgggatcaggctctttttcagcttgaagtaggcggctgcgggcatctgtccgcgcacctcgccgttcacgatgacctgactgcccacatcgctgctgggtttgagcagaataggattcatgcgcacatccggctccatgccggcagcctgtgcctgcaccacctgtgcacggcccatttccagcccgtcccgggtgacaaagctgttcagcgccatgttctggcttttaaagggggctacccggtagccgtcctgtgcaaaaatacggcacagcgcggtgcacagcagacttttgcccgcaccgctcatcgtgccctgcaccataatgcattttgcccggctcatgcaagcacctcctgtaaagcttttaaaagctgctggttttccggcgcggtgcgcacggcagtgcggtaccagctgccgtccagcccggggtagttgccgcagctgcgcagcacgataccgcgctgccgcaaggcgtcgcccagcgtttccggtgcttgaaacagcagataattcgcgctgccatccagtacccgcagccccagtgcgcgcaagccgtcccgcaaagcaggacgctgctgtgcaataagcgcctgcacccgggttacataagcagtctcgtccagcgccgccagccccgccgcctgtgcaaggctggaaactgcccacggctgcccggcagcctgcattttctccagcagagcggtgttgctgcacaggcagtagcccagccgcaccccggccatgccgtacagctttgtaaaggccttcaggatgatgaggttcgggcttgcaagcagctttttggcggtcaacgtctcactttccggcagaaagtccagaaaacactcgtccactaccagcagtgcaccgcaagcttcgcaccggcgcagcagcgcttccaccagcggcagcggcgtcagctgcccggtggggttattgggctggcagaggaataccatgtcggtgtcctcgtccactgcggaaacaaacgcttctgtcaccgcaaaatcttctttttcctgcagaaaatgccgccggacggtgcagcctgccgtttccagcgcggcggcatactccgcaaaggtaggggcgggcagcagcgcggtgcggggctttgccgcccacaccagccggaagataaggtctgccgcgccgttgccgcagaggatgtgctccatgggcaccttctcgtgcactgccagctttgcccgcaaagcacggcaaagggggtcggggtagcggtcggcggtggcaagcgcggcagtaatggcctttgccaccccctccggcaatcccagcgggctgacatttgccgaaaagtccaacgcatcctgtccgtactgcgcccggtaacctgcccagtcgccgccatgtaccagctgcatcataaaatacctcgtatcaatagcccaagcgccagcgccagcaggctttcggcgtacatcatgcagtccgcgcggcggatatcctccggctcaatgggacgcacggcatcgccgatggtgggcttagggtagtattcaccaaaataataggcgggcccggccagctgcacgttcagtgcaccggcgcaggcgctctcggtctgggcgctgttggggctggcgtggttgcggcggtcccgccgccagatgcgccacgcattgcgggcatcgttgccggtcagggcggcagcggctacccacagcaaagcggcaatgcggctgggcaggtagttggcaatatcgtccagctttgccgctgcacggccaaaatagagatactgcgtgtttttgtagcccaccatgctgtccatggtgttgatggctttataagtgagcgccagcggagcgccgcccagcagcatatacaacagcggcgcaatcacaccatcactggcgttttcggcaaccgtttccacagccgccttggtcacgccctcggcggtcagcgcctgcgtgtcccgccccacgatgcggctcacggcaatgcgggcggcgggcagatcgggctttgtcaattcccggtagacgttcgtactctcctgcacaagtccctttgccgccagtgcctgcccgcaccagaacatctgcactgccagtcccagcagcgggtgcagggcagcggctcccatgcagacaaggcttgtgatcgcaaaggtgcccaccggtaagcaaaaggccaagatgtgcccgccccaaagctcaccctttggcgttttgggcaggcgggcacgcagccctttttccagcgcagagatggccttgcccatgtacactaccggatgcggaagccacgcagggtcgccgaaaatggcgtccagtacaaagccgcccagtaccgcgtagccgatcattcctgcgcctcctttgtgtactgcacggcttttatcaaatgcagtacccgctttgccgcccagtccttagcgtccagcacaaagccgccggcgttgggggcgcaccattcgtagtaatccttgtggggcagggcatagcgctccatggctgccatctgggtgccgccgtgggctaagatgaccagcatctcctcgccatccgcaaggcttttatccaccagcgcagaaaaggccgcgcagatacgctcacaaaaagcagccttggtctcgccgtccgggcaggggctttcgcagttggcggctacccatgcaaggtagtccgggtcgtgctccatttcaatatagtttctcccctcaaagctgccaaagcacatctctttcagcctgtctatttccacaagctttgcacccgggaacagtacctcggcggtctgccgggtgcggcaaagaggggtgatgtacacggtcttgggtgagatatccgcccggcacagcatagcgcgcccggcggcagaaagcgggatatcccgctgcccctgatagcgcttttcggcgttgtattcggtcaggccgtgacgcaataaataaatcagcattccggcaattctcctttcaaaacggtggggatgccgcagaacatctgcaccacgcacttagcacgcgccgccagcatacaggcaagccgcccggcattttcccgtgcggcacgctcggccgggtctatgggtaccacaccgccgcccacctcggtggacagcacgatatcataagcggataatttgtccgcgagtttctcaagttcagcgttgtctttgcacccggcggcaagctgctgcacgtctgcaatgcagcggccgggcagggtgcgggcaaaggtgcgtttgccgctgtaaagcggcccggtgatcaagatcataacagccctccccattggcaggcgcacagcgccgccagcatccaaagctcagtcttttgcaaaaaccacccggcaagatctccggtaatgccgcccagctgctgcacagctacatggtgataccacaaaaacagcaaaattgcaactgctgccagtgccccgccgcctaaagccagcagcgccccgcaaagcaggatcgccagcactgccagcacattgcgcacagcggtgcggtcggcggcagtggcaaaggtgtgggcaaggccggtgttttttgccatgggaaaggccgccaccgcaaggccggaaagtgcccgttccagcaccagcgccagcgtccacagcgcacccacccggggcgtgaactgcacgcaggcggcaaggcagagataagctgtaaaatagctgcacagccggatgaccgcaaaggcaccgcagtgcgggtcttttaaaatttccagcttcttttcccggtcgccgtaactggcaagggcgtcacaggtgtcggcgtagccatccagatggatgccgccggtaacccataccggcacaaggcagaaccctgccgcccgcgctggtgcgggcaggggcagcaccccgcacacgaaccacagcaccccgcataaaagccccaccagcgggaaagcgcacagcgcataccgcatattcttttcgttccacgcaaactgcggcaccggcaccgccgaaaacatggcaaaggccaccgcaatggtctgcaaaacgatcatttttccactcctttataatagacagggatgccgcacaccacccgcactacggcgtctgcccgggcggcaagtgcgttgttcacccgtgccagcgccagcagatagcggtccgtgtccccggcatagtccgcgccgccgctgaatacctcgttggaaacaacgatcaagttttcgcactgcgcggtaaggctctccaacccttgcaaaatgtgctcggcggcggcatcgcccgccccggcggggtcgtacagctcgttggcggtcaggttgcccaagtcctccagcagtgcggtacccctgcggggcaaatgcaccgtctctaaatgcagcgggcactcgagggtctcaaactgctttgcagcgcgcattttgcggtgcttttccacccgggcggcgcactcggcatcccacacctgcatggttgccagataataccgcggcaaaccgctgcgcagcacaagggcttcggcgtattcacttttgccgctggcagcgccgcccagcaccagcgtcagcattggggcatatacggcacaatgccgccctccgcaaaggaatagcacccctcgtacaccgccagcgccatgtcccacagcgggatgctggccactgcgccggtgccttcgcccagatgcagcccggcggtgagcaggggcgttttgcctaatgcttccagtaccagccgggcggcgggctcggtggagcagtggctggcaaacacggcctttgccgcagccgggcacagccgcacggcgcacagcgccgccaccccgctgatgaagccgtccatcagcacgggtacgcccgccagcgccccgcccagaaacatcccgcacagcccggcgatatcaaaaccgcccagcttgctcagtacgtccaaggcgtcatcagagtcgggattgttgcaggcaataccccgccggatggcgtccaccttgcgggcaagccctgcatcggaaagccccgcaccgcgcccggtcatggtctgcaccggctgtgccagcagcacggcagccacggcgctggaggtggtggtgttgccaatgcccatctcgccggtagccaccagcccgtaaccctcggcggcaagctgccgggtcagggcaatgccccggccaatggcatccaccgcctcggcgcgggtcatggcggggcctttggtaaagtccgcagttccggcagcaatgcggtggtccagcacgccgggcaccggtgcaccggcgatgcccatatccaccggcagcacatcgcagtgcgccgcctgcgccatccggcagacgctggtgcgccgtgcggcaaggttctcggctacggtgcgggtcacgctctggtcggtctggcttacaccctgcgccaccacaccgttgtccgcgcagagcactgccaccgtccggcgggaaaaatcaaactgcgccgttccggtcaaagcggcggcatcttccagcatcgtctccagcgcacccagcccgcccaagggcttggcaaggcttgcccagtgggcgtgggcggcggcgcgggcggcttcgtccggcggggtgatggcagcaagcagctgcatcagttcagcttcggtcattttcgtcatcctttgtgtttcaaaaagtgctgcgccgcctgtacaaagcggcggggtagggcagtgcccgcccagtaaagatgcgggaaaccggcatacaaatgcgcgtctgaaaagccgcattcccactgccttttttcggttttgcacacagaaaagtctgtaccattttcggaggaatcccagtggtggaattcgtggatgggcagtgcttctccggcgcggaaaagcatactgtcggcctttgccgtcatagcggcatagccaaagcgtaccagccgcccggcgttgtgcccgctgcccggcagcacaccagccatggggtaaaccttgccgtccacaccctccagcgcctgccctaggtacagaaaaccgccgcactcggcagcagtgggcagaccctcttgcacggcgtcccggatggcagcacgcagggcgcagttttcgctcaactgccgggcgtacagctctgggtaacctccgggcagatacagcccgccgatgttttccggcagggcggcgtcccgcagcggactgaaaaacacaagttccgcacccgcatcccgcaaggcgtccagcgtttcggcgtaggcaaagcagaagacttcgtcccgcgctacagcaatgcggacggcgggtgcgcacggcgtaggaagcggcggcgcagccggggcagggcggtcggtcagtgccgccagctgtgcccagtccagtacaagggcatcggctaattgcaacagcttttgctgcaagtcaacgatctccccggcggttttcagcccaaggtgacggctctcaatggcgcaccccggcagatggggcagataccccaccaccggcagaccggtctcggcttccagcatcgggcgcagcgttttgtacaaggcttcagagcaatcattgagcagaatgcccacgatatggctgggtgtgcggaactgcaaaagcccccgcagctcggcggcaagggtgatgcttgccccctttggctgcaccaccagcagcaccggcagtgccagcgtgtcggccagttcccatgcgcttgcgcgggtggtcagcccctgcccatcgtaaaagcccatggcaccctcgcatacggcagcgccgtgcccagcggcatagcgggcgtaaagcctgcgcaccgtatccggggcagagaggtagaggtctaaattgtggctttccacccccagcgcgctgcggtggaacatagggtcgatgtagtccggaccgcatttgaaggcgcaggggtcagctccgcgccgctgcaaggcggtcagcacggcacaggtgacggtggtcttgccgctgccggagcgcggcgcggcgatgagaaactgcatcatgtccgtgcccccgtaatgaggaataccgggttgttggccatcagcagatgcagactgcccgccgtttttgtgcggctgacagaaatctgtgtcacctcggcggcaaggccgtgggcggtcagagcagccacggcgacactgagcgtttccagcgcaatggcggcgatgcacagccgcacggctggatttttgtgcagcacagcgtttataacggcgtccatattgccctttgtgccgccgatgaatacagcatccggtgtaggcagtgtgtccaaggcttcgggcgctttaccctcgatcacggtcagattataggctgcaaatttctcccggtttttctggatgagcgcacaggctttcgggtcacactctacggcatatacctgtccggcatgggcggcaagcgccagctccacacttacgctgccggtgcccgcgcccacgtcccatagggtatccgtgggggtaactgccagctttgccagcgcggcggcgcgcacctcctgctttgtcatgggcacagcaccccggataaaagcatcgtccggcaggccgggcgtgcggcggggcggcagggcttcccgctcgataagcaatacactcagcggtgcaaagctctgcgctgccagctcccgggcaaggccaaagcggatggcttccgccggagtgcctaggttttcgcccacaagggcgtgggcagcgcccagcccggcagcggtcagcttggcgcaaagggtggcaggggtgtccccgccgccagtgaggaaaaacacctgtggatgcgccaaaacctcggctaccgggtcgcaggcgcggccatgggcagacaccagcttccagtcctgccaggggcgtcccacagcggcggctaaaagctgcacgctggaaagcccgggcagcacccggacggagtatcccatggcccgcagcaggggcagcagctttgccgcaccggagtaaaacccggtgtcgccgctatacaaaacagcggtgtccgtatccggctgcgcagccaaacacgcaaggatatcctccggcttatacacggccttgcggtcagcagtgcaccccgccggtaaatgctccaacaggcgctttgccccaaggatgagccctgcgccttgcagcgcggcaagcccttgcgcggtcaagctttccgggcagccggaacccattccgatcagagagatcataccagaacctccttgcagcgtgccagaatttgtgcggcagtttgtccgttttcagccgggcgacgcaccacgatcagctgcgcgccggtgtcctgcgcggcctgtgccttttcggcaaagccgcccacagcaccgccgtccttcgtgacaagatagcggatggagaattgcttcatcaaggcgcagttcagcgcgtagctgaaaggaccttgcatggcaatgatgtttctgtgtgggacaccggcggcctcacaggcagcaatgccctcccgcgtgggcagcacccgggggaacagccgctccgtgctgagcgccgcaaaggcggcaagctcttttgcgccggtggccagcagcacattaccgctgcacccggccagaaacgcagccgcgtgggcggcggtggcaaacaccatgctcccggtgggcagagggctttcttcccgcagcagccggtgatactccaccccggcaacggcacacgcagcccggatgtttttggtggcgtccaccgcgtaggggtgggtggcgtctacacacagggcagcgccctgcaaaagggcggtcatttcctcgggggtcagccgcccgcagtgcacagtgatgccgtccgcttcgccctgctcctccgcacccagcggggtggctacgctgaccagcacctgtgcgcccagtgccgccagctgccgggagaacacccgtccctcggtagtgccgctgaaaaccactgccttcatctgcggtacccccgtggggtgaccattctgccgcccagctgctttgtggtggcattgccgatgtacacggtggtgaacatatccaccgctgtactttccagctgcgcaagggacagaacacgggcggtctgaccatcccggccgatgttgcgcacaaggccgcagacggtgtcggcacttttgccgttttccagcaggatgcgcaccgcctttgccagatagtccggcctgcccttggaggagggattgtacagcgcaacgcagaagtctcctatggcggcgcaggccagccgcttctcaatgacctcccacggggtcagccggtcggaaagggaaataacgcagaaatcgtgtgccagcggtgcgcccagcaccgccccgccgctgagggcagcggtcagtccgggcacgatctccacggcaacgtccgggtagcccggggcaagttccagcaggggacttgccatgccgtacaccccggcatcgccggagcagaccagcgccacccgcttgccggtgcttgctttttccaacgcccagcggcagcggtcgatttcctgcgtcatgccggtagaatagtattcctcgcaggggaattcatcgcggatgaggtcaagatagaccttatacccacagatggcgtcaacgctttccagcgtgttcgcagcctgctgggtcatataaaaaggctcgccggggccaagccccacgacatagaccaccttctcgggacggtcaatgtcaatatccatcacgtcaagcattctgccacctccagtccggggcaaagggcctgcacgccagcgcaaaggtcacgccgttgcaggcaaatttggggtaaaacaggctgccgcctgcgtccagcactgccgcccgctcgcagacgttatccactccggtcacgctctgtacaaaagaggagggggtgaactgcccgggcgcgctgcgcagctgcgcggcagagtaaaaccgcaccggccagctgtgcgcctgacaaaaggccagcaagcccggttcgttctgcttcaggtcgatgcttgcagcggcggtaactgtctgcgcagcaaggccgtgccgggcgcagaaggcggcaaaagcggcctccagcgcttcagcgcttgtgccccgcttgcagccgatgcccagcaccccgatgcgcggcacaagatgcagtgcctgcccggtggggcagagggtgagtgcaaggtcggctttttccggggcttctgccgagaataacccggcgggcgcagtgcccgttaccgggatatctgcccagtaatagaccggctgtccggccagtaatttgccgctgaccagcttgatgcgttccggctccagtaccatgcagttttggtgctttgcccactcgtccaccgcaaaaatgccgtgggcatcggtggcggtggtgatcactggcacggctccgcatacagcggcaatggcccgcgccagatcatttgcgccgcccagatgcccggacaaaatgggcacggcaaaccgcccgcattcatccaccaccaccacagcagggtcggtggtcttgctcttgcagtggggcgcgatagcccgcaccgcaatgcccgcagcgcctacaaatatcagtgcatccgactgcacaaactgcacacctgtccattctgcaagagaagtgccatcctgcccgcaccgggcaacgctgccgggcagggcagcggcaaggcgctttgccagcgcaaggccggtatccgtaaaggcaaggtaggcgcaggtcataccggctctcctttgcggaactcggtggtaaaggcggggtcgtacagcttgctgcgctcgtactgtgtgccgagaaaatctcccactacgataagcgccgtcttggtaatgcctgccgcgcgggtgctctctgccagagaaccaaccgtgcaccgcacgattttttcttccggccagctggccttgtacaccacggcggcgggagtgcccggtttgtacgcaccctgcaaaagcgccgcctgcaccttatcgatcagcccgatggacagaaagatcaccatggtcgcaccgtgtgcggcaaggcttgccagcctttcccgctccggcacgggggtgcgtccctccatgcgggtgatgatgaccgtctggctgactgtgggcagggtatactcggcgttcagtgcagcggcagcgccgcaaaagctggaaacaccgggggtgtcatcgtaacaaatgccgtctgcgtccagtgcatccatctgttctcggatggcaccgtacaggcaggggtcgccggtgtgcagacgcacggtggtcttacctgcggcttccatccggcgcatcacgtccagtacctgctccagcgtcatctcggcactgttgtagatggtacagtccggctttgccagccccagcagcgccgggttgaccagactgcccgcataaataatgcagtctgcggcttgtaaaaatgctgcaccgcgccgggtgatcagatccggtgcgccgggcccggcgcccacaaaatgtaccatgtgcattactccttccattcattcagcaggcgggcggcagtttcggtctgtcccagcgggccgaactggtttgaaaacagcaccgcgcccacccggaacgccccgcccgcgcggcggtcaagatgcagctggatggcggcaagcaggctttgcagcaccggttcccgcagcccggcagtgtccagaatctccagacaggcatccgtggtggcggcattgtacagcgcggtgcaaacctcccggtcggcaccgcacagggcggcgtgggtgcaaaacagctccgtgcggcagtctgccgtgtgggagtgggtgttcataatgccgcccgccagcttgcacagcttgccgacgtgccccaccagcagcacctgctcaaagtgtgccgctgccgccatgtccagtgtatccccgataaagttggaggtcttgaccaccgggatggcggcaaactgcgggtaggtttcgtgcagatagtccagcccgtagttgcccggggcgaggatgagtcgccggtggtcttttgcccgcagcgccgcctgattcatttctaactggatggtgtccagaatggcctgctggctcataggctctacgatgccgctggtgcccagcactgacagcccgccctccaccccgatatggggattgaaggtgcgccgggctacctcctcgccgccggggatggagatggtcacggcaaagccgccggggtagcaggcggcttctgcctcccggcgcagcgcttcggtgatcatctgccggggcacatggttgatggcggcttgcccgaccggctggtccagcccaggttttgtcacccggcctacccccgcgccgccggtaatgcgcacctccggcgtgccgggcagcagcgtcatcgtggcggtcaccggcagaccggtggtcacgtctacgtcatcgccgccgtccttttcaatggcgcattccgcgccctcggcagcagcgcggcagaacaggggagctacctccaccacgatgcccttgggcgtgcgcagagcaacggtttccggcgcaatgccggtcagcagcaaccgggcagccccggctgctgccagtgccgcacaggtgccggtggtgtagccgcagcgcagcagcttttgcccgctgcgcacatagtgctcaaattgaggcttttccggccttgatgggtcaaaaacagcgctgtactgttcttccgtcaggccgtagagcgccttgatattttcccgggcaaaggcctgcgccgggggcatgggggcagaaacgccgtgcggtgaaacgcataccaccgcgtccgcgatcttctgcgccatgtccagctcgtgcagggtgacgatgaccgcaagctgctgctcatgcgccagcttttgcagaatggtcagcagctcgatcttgcccttgatgtccagaaaagaggtgggctcgtccagcaatagcacctgcggctgctgacagaccgcccgcgccagcaaaatgcgctgccgctgcccatcgctgacgcagttgaagtcccggtcggccagatgtgccgcgcccaccagttccagcgcattctgcacctgttttttgtcctcggcagaaaggatgcccaaccgcccggtgtagggaatgcgccccgccgccgcaaactcaaaacaggtggtcaattccgtgcggcgagtgtggggcagcatcagcgccagcttttgcgcacgggcgttgccggggatgcgggcaagctcctgcccgtccagcagcactgcgccgcctaagggggtaagctgccccgccaaggttttgagcagggtggatttgcccgcgccgttcgggccgatgagcgccagcacctgccccttggcagcacccagcgcgatatcccgcgcaagagcagctttgccgtagccaatggcaagggctttggtttcaacggagtttttcatcgcacatcctcccggttgcggcgcagcagcagcccaatgaccaccggtgcaccgaatacagcggtgaccgcgctgatggaaagctccatgggcgcaaacaggctgcgggcaattaaatcacacagcaggcagaacgccgccccgcccagacagcaacccggcagcacatacagcgggcgggcgctgcccagcagctgcttgacaaggtgcggcacggcgatacccacaaaggagatcggccccgcaaaggcggtaacgcaggcggccagcaggctggaaagcagcaccaaaagccgggagaaccgccgcacatccacgcccacgctccgggcgtaggcttcacccatctggtaagcggccatgggctttgcaaggcagaaagccgctgccagcgcgggcagcaccaccagcgccgccgtgcgcacattgctccacgtcatgccggaaaagctgccctgcgaccagttgtgcaggttgacgatgctgctatcctgcgcaaaggccaccacaaactcggtgatggcagagcagatgtaaccgatcattacgccgcatattacaaggatgctcatgcgctgcacccggcgggcagcggccagcacaaaggccatagccgccatagcgcccgcaaaggccgccagaatgagcacggcagagcttgtcagcaggccgtagttcaaaaacagcaccattaccagcgccaccgccagcttagccccgctggaaatgcccatcacgaaagggccggcaatggggtttgcaaaaaaggtctgcagcagatagcccgctgccgagagcgcagcgcccagcaacgcggccatcaccgcgcggggcaggcgcagctgggtaatgatgcccacgctcagcgcgtcctgcccgcgtccggtcaaagcggcaagcacggcctgcggggtaagcgcaacgctgccccagaacaggctcacggcaaacagcaccgccagcagcagggcaaggaagcagtaagagaaaacaaggcgtttgcggctggtcataagcggctcctcaggtgatcctggtcaaaaaatgcagggtgtcggggtcggcagttgccccggtaaaaacggcatggagatccagcataaaatctgccagcgccatgctctgctggaaaaagctgggcgtcgtgcaccagatgtcgccgctttgcaccgccttgcactctgccagcaatgcgcagcgggcaagcagctcttcttttgtggagatggtgccttcgatggtgccgttgtagatgagcacatcggcgtccttgactccggcgtaaagatcctccagcgggatattcatggtagaaaggctgttgccgctgtcggcaagatctgcaaaaacatattcgcccccggccatgccgatcatctgcgccacatagtctccgcttttgcgcacagtggcaaggccgcttgatgtaatagagaaaaacgcgcagcgtttgccggtggagggctgttccagcagcggcgcaatgcgctgcgcctgccgggcgaacacctcctcggcaagggcttctttgcccagcaaaatgccgtacagcttgatccattccatccgcgccagcgggctgctctcgtagctggaacgctccaccagcaccggaatgccgaaccgctccagctgctccttcacctccggggtgtggtagatcatggtattttccaccgcaaggccgcattctgcggtcaggatgcgctcgtagtccggggcgctgtacttgcccgcgtaggcaatgcgcccggactgcatggcctgctttgcctcgtccagataccagccctcggcgcgtgtgccggaaagagcaatgctgtccagcgcgtccagatggaggaataagtccatagcagaggtggacaccagatagatgttctgcaccggctgctgcaaaacggtcacgccctcgggcacggtgcgcagggtggcagcgccctccggccggagaagaaactttgcctgcgcatccgggatggtcagcagggtagagccatctgcgtagcagtcggcggaaaactgggtggcgtagtccagcgggtaggcgtggtcaaacaccagctcgtccgtatcggcgggggcggtgggcgcggccgtgcagcctgcaagcaccagcgcggcggcgggcagagcctttaaaaattgagcgcgggtcagcttcatggaaggttactccaaggtaaaggtcagggtgtattcgatctcgtggggcttgctcatggcaacggtgtcggcggtaacagtcagcggggtgcccagagcagccacgggaatctcaaaggtagagttgccctcggtattggtaggcagatacttctcaccatccacgatcatgtagtcgtagttggggctgctccacacgatggtagcggtcatcttgccctctgccacggtcagggcagcggggctttccacggtggcgcggccggagccgccctccagcaccacggcagcggtgtatgcaccgtctgcgggggtctcagcagcctgctccgtcttaggctcggcgttgcgcacgcttacggtgtggtcgtaccacttgcccttggtgcccagcaaagccagctggaagtcggtgtccagtgcttccaccgggatgtcgtaaccgtacacctcctcggtggtgccatccgcgtaggtgacagtgtccacggtggggatgagccatgcagtcttgttggcctcggcatcggcggcaaggccggggtagaggtttacgatctttttggaagccagactgacgtggaaggtcatcacgccgttttccacggtcagggtgcccttgccgttgcaggcctcgcttgcgtggaacatactgctgtcggtctcaaagtcagcggtgtatacgccgtccggcagggcagcttcggcagcggcagaggaaaccaccacggaagaagcagccacagagcttgccgcagcggatgaggcgggggcagccccgccgcagcctgccagagaagcagccagcaccacaccggccagagaaacgaaaataaactgtttgcagcgcataaaataaatacctcagtatcctaaatttttgcccggcgtctaagctgccggggtagggggcgttttctcctcgtgcggggaatgcgcccataaaagaaagccctctccgtgtgcagggcagcgccggagagggcttctgaatccattagccgttcagaagatccatagcggccttggtatgtgcaatgtacagctgctggacatccgcaatgcggcccagaccggagatctggcagtccacatcctcaaagcagcctgcggcggtaaactggctcagccagctgtcagcgtcctcaccggccatatcgttgttggcgtggtcgcctgccaccaccatcagcgggcgcaggatgaccttggtgtaaccggcagcctttacagcctcgatgacggcctcgcaggaggtgtcctcaggctcgccctccaccgtgccgatgaacacgttgtcgtagcccaaagtctgcatggtggtctgcatctggctgtagctcaccttggcggtgtgggaagtgccgtgacccataaagacgaaagcggtcttgtcggcagcggcagcggcggcgctgtcgtaaccggcttccttcacagcggcagcggtaacggccttggcaacagcttccttatctgcattgatgacagaagcatccgcgccgacctcgcccagcaggggctcagccacagcaacgctctcgaacttgtcgcggtactggtccagcatctcgttcatctcgtcgtactctgcaccgtgcatcaagtgggtgggctgcacgatcaggttcttcacgccgttagccacagcgcggtccagcgcctgctgcatattgtcgatcttctctccatcgcgtgcctgcacatggttgatgatgatctgtgcggtaaaggcgcggcgcacgctccagtcggggtaagcggcctgcaaagcatcctcaatgcccttgatgtcggcagcgcggctgtcattgaaggaggtgccgaaggacaccaccagcagctcgttctcgccgatctcatcggcgttgcgggcatcgtccttggaagcatcgccggtgtcgcggccaaagtagtcggggtcggcgttctcgccctccaccagctccttctgggcatcggtcaaagcgtcccaagcggcctttgcagcttcgcactgggcgtcggtgtcgtcggtgcgctgctgcacatagatggcatcgatcaggtctgccacgttctgtgcggccagtgcgtcagcgtctgcgccggaagcttcgctgctggcggcagaactggcagcaacagaggaagccgtgctggatgcagccccgccgcagccggtcagtacaccggcgcacagagccagagcggtcaaagcggccgccgttttgcggatgttgcgttttttcatcttgttttcctttcctgatgtgggtaaaatacggcaccgaacagaagggtacaggaaagagaacctagggtgtatctgaaaaaacggggtcttttgcttgcgaaatggcaaagcaaaaagaccccgtatcttacaggctttttggtacaaccaattcctcgtgatctggggcggcaaagccccggtaccaacagcgggcaggtttcctgactgaaagctcaacgcccgctgccgccttcccaagccggatgactcagtgaccggtgcaaaagcaccctgacagtggactcccttatcacagtgacgagatcgtgcgggatctgcacccgcttcccttttaacgttcctgccgccgcccggtggggcaaagtgacggaacgcacctgctgttttctgttcagttcgacaaaaagtatagcacagccccttacaaaacgcaagaaaaaacggagaaatgcttgaccttccccccgccggaaggtgtatacttggctcgaacctgaaagcaaggagacagcccatgttaaagcctatgttaaagatagaacatctgaccaaaacctacggcggcaagcccgccgtgcaggacctttgcctgcacatccgcccgggggagctgtgcgcctttatcgggcacaatggcgcgggcaagaccactactttaaaatgctgctgcggcatccagcaatttgatgccggtgaaatttatgtggacggcatttccgtgcgggacgacccgctggaatgcaagcgccgtctggcctacctgccggacgacccgcagctttacgattatatgaccggtatccagtaccttgattttattgcagacatttttggcgtaagcgccgcacagcgggcgcagcgcatccggcagtatggcgatgcctttggcctgacgccggacttggcacagtccatcggggcatactcccacggcatgaagcagaagctggccatcattgcggcgctgctgcacgagccgaagctgattttaatggacgagccttttgtcgggctggacccgctggcttcccatcagctcaagacccagatgaaagccttctgtgcgcagggcggggccatctttttctccacccatgtgctggaggtggccgagaaactctgcgaccgggtagccattttgcgcaagggtcagctggtgcgcgagggtgccatggagcaggtgcgcggcgacgacacactggaagaggtctttctggagctggaggatacgggggaagcactatgatccgtgcattgctcaaaaaacagcttctggagctgggtgcggcctttgtgcgcagcagcaagaccggcaagcgacgctcccgggtggggacgtttggctacgcgctgctgtttacagtgctgatgctgctggtcatgctcagctttggcgctatggcgctgccgctggcggtaacgctggtgccgcaggggctggactggctctattttgtgctgatggagctttcggcgctgacggtcagtgtgctggccagtgcctttaccagctacggacatttgttccgctgccgggataaccagcagctgctggcgctgcctatcccgccgggcgctatttttgcggtgcgctgcggcggggtgtacctgaccgggctgatttatctgctgctggcgtgggtaccctcggtggtctgctatgcgctggcagcaccctgtcccggcggagccctgctggcggcgctgccggtggcactggcactggcgggagtttccatggtgctggccgtcctgctgggctgggcggtggcgctgctcaaccgccgcgcccggcacaaaagccttatcaccgtggttggtacgctgctgtttctggcggtctactatgcagtgttccaatgggtgggcaacgcggtagatgcccttgcgctggatgccgtgcaggcgggcgcggccgccggtcgtgccgttgcaccgctacatctgctgggcttggccgcagtgggcagcgctcccgcacttctgctattgctggcactggctgtggcctgtatggtgctctgcggcaaggcgctggcaaagccgtatctgcggctgctgacccttgagccgggaaagatcaaagcggaataccgcgcaaaggcgcaaaaaaagcagcccccgcaccgggcattgctgcggcgggaactgctgcatctgggcgcttgccccatgtggctgctcaactgtgccctgagcagtctgctgctgccggttctgggcgcggcagcgctgtggaaggctgctgacctgtgcgcctttaccgccgcttacccgcccgagagcctgcccatgctggtgtgcgggatggtgtgcaccgcagccgccatgaactttatcacagcgccatcggtgtcgctggagggtgacaccctctggctgctgcaaagcctgccggtgaccccgcagcaggtgctgcgggcaaaggtggagctgcaattgctgctcacgctgccgggggcgtggctgtgcgccgggtgtgccatggcggcgctgcgcattccggcagggcaggggttgcccgtgctggcggtgctggcagcctttgtgtggctgacggcgcagcttgggcttgctttaggactgtgcctgcccaacctccactgggtcagcgaagccgctgtcgtcaagcggagcgccgccagtatgctggcgatgttcggcgggtggctgctggcgggcggggtgctgtttttgcccctgaccttgctggactacgccgtgccgccgctggcagcacagactgtttgtctggcggtgctgctggggctggatttactgctgcaccgctggctgtgcacccgcggcgcagcccggtttgccgccctgcactaaagtggggcgaattggaatgccctccgctttgctttgggcatattcagcggaaaaatcatttgaatagagcaaaatcgggcaggccgtggcctgcccgattttgcattttcacgggagggaacgtaatggaaaacagccactgccggcagaccggtgaagctttttgttttgcagttatagcgcatccaatgcggtgcgggcggcgcggatattctcctcgctggtctgccatatctcgaactccgaaaagcccggcagacccatgggcacgccctcccgccggaaggtcatgcggctgtccagcacctgcttgccggaaaggtggaacgcccgggcaccggtctgggcggcaagggcggggatgttggcggcagatacgcctgcgcccaccaatatctccacttcctgcccggcagcttccaccagctgccgcagcagggcagcaccctgcggggcgcttgcggcctgtccgctggtcaggatggtggcaagccccagctgctttgcggcttccagcgcggcaaaggggtcgcagcagacatcaaaggcgcggtgcagggtgcagtccacggtgcggtgtgctttttctgccgcctgccgggctgcggcgtagatggggcgcagggcgtctaagtccagcgcgcccgccggggtcagtacgccggtcacgataccgtctgcaccggcagcgaccagctctgcggcgcattcagccatctgtgccagctcgtagcggtcgtagcagaaatcgccaaagcggggacggagcagcgcccgcaccggcagaccggtctcggctttgacctgacgcagcagggcaggggaaggagtggtgccgccgatgatcaggtcggcacacagctccagccggtcagcgccgccgcgttttgccgccagtgcgctggcggtgctgtctacgcaaacttccaaagtgcagtgcatagcgatacctccatctacaaaaaacgattttgaatggccgccgcgctgctttggccattttcagcggaatgaatattttaatttatcaatgggaaaatctgcggattttcccattgattttttcacaggggggagcaaaggaaaagtgcttttgttcgatgctgtgctctaaaaaaggctgttgcgccatgatatgtgcaacagcctgggggttatggtttattttacgctttcaaggaagcggacaaaaccggcgcggcctgcttcatccagcttgtacacaccggcatcggccagcacctgtgcgaacacatggcccacctcgtcctgcaggatcaggtgcacattgtcggcgttcagctccgggtgctttgcaaggatctcctccgcccacgcggcgtgcttttgcaggctttcggggtattctgcggtgggcaggtgcgccaccagcacatcagcaaggtcgaacagctcctgcttcaggcggctgggcagcacagccagacccatcacctcgatgaggccgatattctcctttttaatgtggtgcagcttggcatggggatggtacacgcccagcggatgctccggggtggtgatgttgttgcgcagcaccaagtccagctgatacttgccgtcccgcatccgggcgatgggcgtgatggtgttgtggggctcgccatcggtctcggcgaagataaagcagctctcgtcggtgtagccgcgccaagcagccagcagcttatcggccagttccacaaggcgtgcgtcatccgcacaggtcagacggatgcagctcatgggccagtgcacgataccggcttccacgtcctcaaagccggggaacacccaaggtttttcaataggagctttggccatggcaaactcataatggccgccctgaaagtggtcgtggctcaggatgctgccgcccacgatgggcaggtcggcgttgctgcccacaaagtagtgggggaacagacccacaaaatccagcagcttacggaaggtcgcccgctctatcttcataggggtgtgctggttattgaacacgatgcagtgctcgttgtagtagacgtaggggctgtactgcaaattccacgcgctgtcgttgatggtcagcgggatgatgcggtgattttcgcgcgcggggtggttcatgcggcctgcgtagccctcgttctccgcgcacagctggcacttggggtaagcgctctggggcgcaagctttgcggcggcaatggcctttggatccttttccggcttggacaggttgatggtgatatccaaatcgccgtatgcggtcttggtgacccacttcaggtcgcgcttgatgcggtagcggcggatgtagtcggtgtcctgactgaacttgtagaaccagtcggtggcggcctgcggaccctcgttctcgtaccgctcctcaaagtttgcgcgcacgatgctggggcgcggggtcagcacgcccatcagcttggtgtcaaacaaatcgcgtgcggtggagttgtcctcgcacacgccgcgggcaacggcatcgtccacaagggtcttgaggatgctttccagatcggtgtagcacacttcgctgtccggggcggtaaagtcgtccagctgcatggtcatcagcagctggttgcggatatagatctcgtcatcgggcaagatcagcccggtgtccagcccgtagttcacgagctgctggatggcagtggatatcacagcacagcacctccctcaggacggatgttcagcacatggcagcggccagcgccgaggatcttttccatgttggccttaaagtctgccagcatctccaccggcacaaaggcctgcaccgtaccggcaaaaccgccgccgtgcacgcgcacagcgcccttaccgcccagataatgcttggcagcggcgatggtcacagccacctcctgatgctccttgtaaccggcggggatgacgttctgcaggtattcccagctgctgtcgccggaggcagtcaccatctgcaaaaaggcgtcaaagtcgccctcgcgcagggcagctacctgctggggcacgcggtcattatcggcgtagaagtggaaggcgcgcagcacagcgcggtcgccgcactgcttgcggcaggccgggatatttgcaaggaaggtctcaaagggcacgtcccgcagcacctcgccgccgcacacagcggccacagcgcggcactcgttggggatggcggcgtactcatcggtcaggtcggcatggtctgcaccggagtccagaatgcacagcgccagaccggccttggaaaagtccacctgcaccggctccacatcagggtttgccttgtcggcaaagtcgatggtgataatgttgcccacgctggaagccatctgatccatcagaccacagggcttgccaaagtagacgttctctgcccactggccgatctgtgcaatggcgatgggggagaccttttctgccatgaaacagtcgttcaagatcacaccgaccagcacctcaaaggcggcagaggaagaaacaccgctgcctttgggcacgttggaggagatgtacacgtccagaccagaaagctttgcgccgcgctgacggaaggcttcgcactcgccgcgcagcagggaagcggtggtgttctcctcctccttgcgggcggtcaggtcgtcaaggtcgatgacgcacaggtcgtacccctcgctctgcacgcgcagctggttcaggctgttgggggcggcagcagcgatcatatcaatgttcacgctgcctgccagcacacggccatgctgatggtcggtgtggttgccgccgatctcggtgcggccgggggcactatacagaccggcttcggtatgtgcgccaaaggtggtctctaacccgtccagaacagccgcatagcgggctgcctgtgcaggggtctcgtcgggggtgcagcagtacagcgcagccagacgcgcagcgtgtgcgccctcggtcagctcctgcttccaggtggaaatggacttcatcatggaaatttcctcctactattatgatcggaaaagtcgatgcagccgttcgcagctgccgtagctgcttctataatagtcaaacacaacgcaaaaaaccatgtgttattgttgcatctcgatgaaaagttgcaaaaaacacccgcgcagcccgattagctgctgccgaacaaataaaataaaaatttttccggcaaatcaaaatgcttggcataaatgcacacaaatcccggaattttgagcgcagcgcccaaaaaagacgggatggaaaattgcactttgcacaaaaaaacatccccgcaccgatgcagccatcgggtgcggggatgtggttcagcgggtaaattcgctgccggtcaggccgtcaaggttcagcattccttccagtgcggcaatgtcggcgttcacgtccagcgcatcggcttggaacagcttgtccagctggttttcaaaggcggtcaccagcaggtccatgctgcgctcgatgctgtgtttggcttcggtaatgttcgtgccctctaccgcctgcccggaaaggctggcgtaggtgttcagcagcttgagcgcggtgggcagatagtaattcataaatttttgcagctgtgcttttttgtccgggtccttctgcgccagcgcaaaaatgcgcccgctgacctcttccagccgggagatcttcgcgctcatcaccgggtcagggatggcatcgttcacctcccgcagctggcgcagcagggcggcgtattcgtcctctgcggcgggctggggcttgggtgccggggtctgcatgggctttttcggctgcggtgccgcgccccgcaccaccagcgtgtcggtgcggttgtcaatgtaggcatctgcgccgaagtatccgtgctcaatggcgcttttcaccgcagtgcgtcctcgggcggcgtccaccccggcggcggcaaacagttccggcagggggatattatcccgctcgcccacaaccttatccagcagctgctccagcttgtgggtgctcttcatccgcaggccggtcagcagtgcaccgccgccgccaatggccatggcaatattggaaaacagctccccggggtcgggccaaaacttccacacactgatgacatccaccgcgtccgtcacgccggcaagcagaaagaccgcacccatgatggtgcagagggtggcaatattcttgtgccactgtttggcgcttttctgctctgccgttgggatgtcctgcccataggatgcgtttgctttctgcgttgaggcaggttccgggtcggggcggtagccgccccggacagcggcggcttcctgctcctccttctgcaccttctggtcgatgcctttcaggatgaacagcagcacccccaacggcccggacatcgccatcacgataaagatggcaatggtggggatctttgcaaaataatgttttttcggctccatgaaataaatttcctttcacagaaagataaaaataaaagaccgcgttccactctattatagcggagcgcggcctttttgttaagggggtatttctatcccgtgaaaatgcgcttgtcgcggtccgcagaccgcgacaagcgaaaaattaaaaatatctcttccgctgaagatggccaaagcgcacgcggaggccatttaaaatcgttgacacaaaaagaggccgctgcgcaaatgcacaacggcctctccataaaaacttacttcatcaggctgcaaacggcttcggcataagcggcggggtcgtccacgggcagaccctcgatcagctgtgcctgtgcgtacagcagggcgctgtacttgttcagcttctcggtgtcgccagcctcctgtgcggccttcagggcggcaaacacggggtggttcacgttcagttccagcaccttgtcgctcttcacaccctcgctgccgggctgcttggacagcaccttttccatctcaatggacagcgggccgtcagagctcaggcagacggggtgatccttcaggcgggtggagaccttgacctccttcaccttgccgttcaaagcgtccttcatggcgtcgaacagtgccttgttctcggcagtggcatcctcggcggccttcttctcctcctcggactccagacccagatcgccgctgttcacgttcttgaactccacggtgccgtccttgccctcggcatccttgcgggggtagctgtgcaggatctgcaggcagaactcgtccacgtcctcggtcagcagcagcacgtcaaagcccttgtccagcaccagctccgcggagggcagctttgccagacggtcggtagagtcgcctgcggcaaagtagatgtacttctgctcggcgggcatcttgtcgatgtactcctgcagggtgaccatcttctgctccttggcagaccagaacagcagcaggtcgcgcagcagctcggcgtgcataccgtagtcagagtaagcaccaaacttgatctgacggccgaactccttccagaactcctcgtactttgcacggtcattgttcagcatggcgtgcagctcgttcttgatctttttttccagtgcattgtggatcagcttcagctggctgtccttctgcagcatctcacggctgatgttcaggctcaggtcctgactgtccacgatgccctttacaaagctgaaatagtccggcagcaggtcggcgcacttttccataatcagcacaccggaagcgtacagcgccagacccttttcgtagtccttagtgtagaagtcgtagggacggtggctgggcacgaacagcagggcgttgtagttggcagtgccctcggtgcggctcacgatgacccgggcgggatcggcgtaatcgccgaacttatccttatagaagctgttgtactcctcgtcggtcacttcgctcttctgcttcttccagatggggatcatgctgttcagggtctccaactcggtgtaggtctcccactcgggcttgtagtcctcgggcttggggtccggttccggcttctgacggctcttttcacgttccatctggatggggtagcgcacatagtcgctgtacttcttcacgatagccacgatgccgtattcgtccaggaagttgtcgtatttctcagtgtcggtatccggcttgatgtgcagaatgatctgggtgcctacggtgtccttctgggcgggggtcatttcgtaaccgtccacaccggaggactcccactgccaagcctcgtccgagccgtaagccttggagatgacggtcagcttatcggccaccataaaggcagagtagaagcccacgccgaactgaccaatgatatcgatgttttcgtccttgttgtcctttttgaaatccagagagccggagtgagcaatggtgcccagattctgctccagctcttccttggtcataccaatgccgttatcctccacggtcaggatgcggttttccttatcgcgggtgatgaggatgcgaaaatcgcccttgttcatgcccacggaggtgtcggtcaggctcttataatacagcttgtcgatggcgtccgaagcgttggaaatcagctcccgcaggaagatctctttattggtatagatggagttgatcatcatgtccatcagttttttgctctctgcctgaaattctttcttggccataatacaaaacctcttttatcacatatttggtgcgccgtgtccggcaaaacgccggattgcttagcactcataacttctgagcgctaatatacaacgacttgcagggaaaatcaaggcttttcataaaaagttaaaaaagttaaaatttgttctcccgtgcacgaaacggcgcgcccggatcgtttcttatatgaaggacgaaattttttcggaaaagctttcccacttttgcgcagactgtgctataatggagcgagtatgccggaaggatgtgagaaaatgtcaaaacagggcgatgccgcctacgcatggttcttaaagggctataattgcagtcagagcgtggtggcggcgtttgcaccccagcttggcctgaccgaagaaacagcgctgcgcctttccgcaggctttggcgcgggtattggccggatgcgggaggtgtgcggggcgttctgcggtgtggtgaccgtgctgagcatggtctatgccgaccccgccgacccaaaggataaatcccggatgtacgcgctggtgcagcaggcggcagagcagtaccgcacccgcaacggcggcggtagcatcatctgccgggagctgctggcaaaggcgggcgctgcccctgccgggggcacagcggcagaggaccgcaccgcagactattataaaaagcgcccctgcccggagttgtgccgcatttgcgccgacctgtgcgcagagttcatcacggcccacccggaagggcggcacggcttttataaggaggatgcgtaaatgcagcttgaacaactggaattgaccggcggcggtacgctgacgctctacctgcgggagagcgtggaggccatgccgcatttccggcagcgcccgctggtgctggtggtgcccggcggcggctatacccacgtcagcccccgggagggcgaccccgtagcgctgcaatttgcggcagctggctaccacacggcggtactgcactacgcagtaggggagagcgcccgggatgcgctgcccatgcggcagctggcacaggccatcggccttgtgcggcagcacgcagaacagtggaatattctgccggatcagatcgctttgtgcggcttttctgccggcgggcatctggcactgtccggtgcagtgtgggagatccccggcatggcagaccagccgcggcccaacgccctgctgctggcatacccggtggtcaccgccggagaatacgcccacagggacagctttgtgcagctgaccggtacgcaggatattaccgcccaccagcgctttacgctggaggataagatcacccccgccgcaccgccggtgttcgtctggcataccatggaggacgaaactgtcccggtggaaaacaccctgctgttactgaatgctctgcataaggcaggtgtgccgtgcgaagcacacctgtttgaaaagggacgccacggcaccagcatctccaccccggaggtggacgccgacagcacccaccgcaaccgctgggtgcagcttgcggtggagtggctgaacgataccttttccttccacgcctgagataaccgactgaaacagggaaagcgtttgtaaattttgaccgtacctacaaaaaattcacaaataaaccgttgacttgcacaggcgtatgccgtatactgtccaacggggataaaaccacgaaagaaggaaacaaaaatggttatggatcccacactgccgcgcatcaaggtgcgcgatctgctcatgcaggcatttctcaccggctgggagcgctcggataagagcacctcgcaggacgagtatctgcaaagctccattcaggtcattgagatgctgcaggtggagccggaaaacctctacgcagaggaaggtcttggcctgccggacggcgaagaggtggatcatctggacgatctgctgcgggcagacggcttctggctgtactacggggtagaagcggaaaacttcttcctgatccagtggtacccggacgaagccgctgccaatgcaaagcttgctcagctggaagaactgggcgatggcaagcagtatctggtggatctgaccctcaagcgggcaaacccctccaaggccgaaaacttcggcaattccaacccggtgcagctccgctcctgacattttgagttgaaaggaaattttgctcatgcagctttctgttacggaacgcgaacagctttatgccattctggaaaaatacgatcagaaccccaaggtgcagcagatgcgggagttcatccagcacggggacgttaccacctatcagcactgcaagaacgtggtgctggtcagctgctggctgaaccaccgcctgcatctgggtgcggacgagacctcgctggctgtcggagctttcctgcacgatttttacctgtatgactggcacaaaaaaggcaccttccacggcatccgccgcctgttcgagatgcacggcttctcccacccgggtcgtgcctgcgtcaatgcggaacaggtgttccatatcaccaaaaaggaacagagcatcatttccagccatatgtggccgctgaccttccgtcatgtgcccagctgccgcgaggccattatcgtctgccttgccgataagtactgtgctgtggtggaaagtatgttcaagcacagccgtgtggctgccgccaaaaacgccgacggcgaatacgacgagtggtaaaattgaatcattgcaaataacaggagccgctgcacccaaaaagtgcagcggctccttcggctttatactatatacgccgtgaaaaggcagagggggaaaatccgcagattttccctgtctgcaaataaaaataattctgcgccaagcggctggtcacagctttttgaacccctccggttcgtctgcggcgacgcggcgctccatcagataggtgtccagccagcggccgtggcagtcccgcgcaatgcgttcccggcgtcccaccagccggaagccgcacttggcgtgcagcgcacggctggcggcattatcctgcaaaacggtggattgcagcgtccagtacccggctttttcggcagcggcgcacagggcgctcaacagctggaagcccagcccgtgcccgcggaactgctcgcctacataaatacttacctcagccacgccccggtagcaccagcgggggtctacccggtgcaaggcgcaccaccccgccagcactccgccggaaagaatgaccagacggcactcctttgtgtgggaagcgtcccacgcggtgtagggcgggcattcggtctggaaggttgcgtattccgtggcaatgccctcaacatagattctggagactgtgctccagtcctccggcgtcataggccggatgatgatcttatccatactttcatcctcggcgggccaaaaaattgcccgcattctctttccactcccggataaattccagtatagcagaatttgccgtatggtacaagaagcggactgcacagaaattgctttgacatccccctcatttgtgatacaataaagggacaagaatgcacagagcggcgcatctgtactggtagatgcagccgtatgccgggcgcggcattctgctgtgggaaaaggagtagagaatatgaaggactggaatacctgttttgcatacctgaacatggagctgccggacgatatccgccgcctgaaggaggcaggctactacaacgccgccattgcgcgcatcgatgcctgcttggccgaggactggactgccagccagaaccagcccctgcacccgcagggtgcgctgccggtaaaccccaccccacacggcgtggatgcatggcggcagggtctgctggcgcaccgggaaattctgcgccgtctgccgcaggactacaccctgactgccgagcagctgctgaaccggctgcaggccaccctgcgggactttaccaccgaggaatttgccgcgctggacgctgccggacagatggactggcgctttgtggaagggcagaagcgctacatctaccgcgctgccgaaacgctggtggccacccatcccgaccttgccgcccgtcagctgaacgcgcccgtcccggagcgcagctgggatcgttttgagccccagcacgaccagatggtgcgcaccggtgcagtcagtgcagacatcaccctgcgcaccagcatcggcatgaccgacgagacctttgcccgtgcccttgccgctgcaaaggccgaaggcagagacaccgtgcacgtcaaggtgtggctgccgctgcccgctgcctgcccggcgcagagcaatatcacgctggacagctttaccgtgcagcccacttatatcgccccggaaactgcacctcagcgcaccgcatactgggagacagaccttgccgagaactgccgctttggggcacagtacagctaccgcagcaccgcgcactacgccgccccgctggagctgcacgccgacccggtgcagccggatttcgacaccgccgagcagctgccccacatcgcctttaccccctatatgaaggcactgactgcgcagctgaccgagggcatcaccgacccggtgcagaaggcaaagcgcatttatgattttgtcaccctgaacgtgcactaccacttccagcccatgtattttgtgcacgagaacatcaccgataattgcgcccgcagccgccggggcgattgcggcgtgatggctgctacctttatcaccctttgccgcattgcaggcatcccggccaagtggcagagcggcatggtggcacggccggagacagccggctgccacgactgggcaatgttctatattgcccccaagggctggatgtacgccgattgctctgccggtgcgtctatggcgcgtgcgggcaacgagaagatgcgcctgcactacttcggcaatctggacaccgaccgcatggtagctaacagcgatatctgcgcgcccttcgacccgcccatgtgttccttccgcgccgacccctgtgataatcaggtaggcgagatagaggtggacggcgtgggtctgtacggccagcaggtggagactacacaggaaatcgtaaagcatcaggaagtataaacacatccgggtctgccgttaccgcaagacccggatttttgagttaaaggagaatgtctatggaatttttggcaggactgtatacgcttttgctggtggccatctgcctgttgcaggcgcttttactgtaccgcaccggcaagcccgccgcccggcaggatgatgaagccctgaaagagtggctgcgccagcagctggaagcacaggcgcgggtgctggaagaaaagcaggcgcagcaggcacagcagaatctggccgcaatggcacacatcagcgataccctgcaaaccgcagtgcagggcatgagcagcaccctgacagcaggacagaacacccagcagcagaccatggagcagcgtttgcaggggctggaagcctccaacgcccgcaagctggaggaaatgcgcaaagcgctggcagacggtcttgccgccatgcaggcacagaacgcccagaagctggacgagatccgtcacaccgtagacgagcaattgcaggacgcgctgcaaaagcgggtgactgaaagctttaaggcggtcaacgaccagctggagcaggtgtacaagggcttgggcgagatgcagagccttgccgcggatgtgggcggactgaagcaggtactttccggcgtcaagacccgcggcattctgggcgagatccagctgggcgcgattctggaagagatccttgcgccggagcagtacgacaccaacgtagccaccatccccggcagcacccagcgggtagagtacgccatccgtatgcccggtgtggatggcaacagcgtctggctgcccatcgactccaaatttcccggcgatacctacgcccacttgcaggacgcacaggcttccggcgatgcgcaggctgtggaaaacgcccgccacgcgctggaactggtgctgcgcagcgaagcaaaggatatccgggaaaaatatgtggagccgccctataccacggccttcggcatcctgtttctgccctttgagggtctgtatgccgaggtggtgaacgccgggctgctggaagttttgcagcgggattatcaggtgaacgtggccggccccagcaccatggcggcgctgctcaacagcctgcaaatgggcttcaagaccctcgccatccagaagcgctccggcgaggtgtggcagctgctgggcgcagtcaagaccgagttcgataagttcgggcaggggctttccaagatgcagcagcgtctgcgccagaccgatgaagagctggataacctcatcggggtgcgcagccgcgccatcagccgcaagctgcgtgcggtgcagacgctggacgaaaacaccgccgccaccctgctggaactggacaccgagccgggcagaccggtaacagcgcgtctgccggagagcggggaagagctttgatgcgcagaagctccccgcattatcccttgcgaaatttctgacgatgtgctacaataggaattgttctcagaaatatttgccaattcacggcacaagataaacccaaaaggagtctgaacggtatgagcatgaaaaaaatcagcgaagccatccttggtgtgggcgtggacgataccaccatcgacctgttcgagagccagtatccggtgcccaccggggtcagctataattcctatgtcattctggacgaaaagaccaccattctggacacggtggacgcccgcgctaccgagccttggctggaaaaccttgccgaggcactgggcggccgcaagcccgcctatctggtggtctcccacatggagccggatcacggcgccaacgtggcaaagctggcagccctctacccggagatgcaggtagtgggcaacgccaagaccttccagtatatggagcagttctttggcgcagatgccattgccccggagcgccgcgtggtggtgaaggacggcgagagcctgagccttggcacccacacccttacctttgtgtttgcccccatggtgcactggccggaggtcatggtcagctacgagagcagcgagaaggtgctgttctccgccgatggctttggccgctttggcgcggtggcaaagtttgacgaaaatgccgactgggcaagcgaagcccgccgctactacctgaacattgtgggcaagtacggtccgcaggtgcaggcactgctcaaaaaggctgcggcactggacatcaagaccatctgcccgctgcacggtccggtgctcaccggtgatctgggcaagtacctgaactactacgatctctggtccagctacaaggccgaggagccggaaaagattctggtggccagtgcctccatccatggacacacccgcgctgccgcccacaccatggctgaaaagctgcgcgcaaagggcgcaaaggtagtagagatggacttgacccgcaccgatgtttcctacgctgtcaccgaagccttccgctgcggcaagatcgtgctggcctgcgccacctatgatggtttcctcttcccgccgatggaaaacctgctgacccacctcaagaccaagaacttccagaaccgcactgtcggtctgatggaaaacggcacttgggcacccatggctgcaaagcttatgcgtgccgaactggagagcatgaagaacatcaccctctgcgagaacgtggtcaccatccgctctgccgccaacgctgccgccgaagcacagatggacgcccttgccgccgaactcgtggcaaagtaacacgatataaaatcagttgaacgcaaacactcccggactttctgcaaaagcccgggagtgttttttgttcctttgtttgtttgattatctgctagattatgagcggaaaacacgaatttttacgtcgttttttgaaatgtcaacaaacaaaaaaacggtgaaacgaacaaattctgaacgtttcaccgctatattctggagcaggatacgggactcgaacccgccgcctactgcttgggaagcagtcgctctaccggatgagctaaccctgcaagtgctccactattgtaacaaagcagggcaggaatgtcaaggcttttctgcacgaaatttgcggtcagctcattttggcccatgtcagatccagcaccgggaaaaacgggtcgaataccaagtcgcgcacgccgttcgccagcagcagacgcttctgctgtgccatcaggggcactacggtgcagctttccagcagctgctgctcacactgcgccagcagggcacagcgggctttgccggtctgctgggcgctcagtgccagccggtcggcataaacggtatcggcatagccggtcagactgccgcctgcggtggtgaactgctgcagcatctggtacacgctgccgccctcggcacggatgggcgcaagggcaatggtgtatttcccggcggcaatgcgggcgtcaaactcgtcctgctctacctcttccaccgagaagaacagggagcactccttttgccatgcgctgttgatctggtcggccagttcggtcagcccagcactcttgggcagcagcagggtcacaccggaaaaatctgaggtagccatgccctgccgggcagccagatacagggccttcggctccgggatagcgggcaggggatcgccggcagttttgcggtagtccagcccatccacggtcagcccctccggcacaagcccctttgcggctgtgtataggccgctggagggcacatcggcgttttcccgggcaataccggtcagcgcctgccgcagctgctggttctggaacaccgacccctccgccgcgttgaacagcagcgcccatgtggtgtcggagtagcttacggtctgtaagctggtggcctcgccgctctcatccagcgcggcagagcatttgtcgtcagcaataagctgggctgcgcttttgccgctgccgctggtgtcctgcaccagacgcagactgccgaccagcgggctttccacggtgcggcgcaaaaacaggccgtttgccgtccagttatacagataaaagctcccgctggaaagcgtagtcttgtcggtcagcccataggtgccccgggtgctctcaaaaaaggcctcgtcacagggggctgcaccgggcatggccagctttgccaaaaagttatcgtcccgctcgctcagccggaacaccaacgacagtgccccattggctgaaacgcccagactgctttcgtccgccagccccgccagcacggcggcgctgttctgaatagccgaaaactccaccgcatagggcgaggcggtatcggcacggaaaatgcgccggaacgcaaacacaaaatcctcggcggtaatatcgtactctgtagctgcacccttggcggcagcgtagcgcaagccgtccttcagggtaaaggtgtaggtcagcccgtccggggacaccgtccactcttcgcagagccccggcacaagctcgccgtccgggtctttgcgcaccagcgtgccgtacagattctcacaggcgatcacgtccgacgcaccggaagccacctgcgggtccagatttgcggggatgctgtccacgaaccatgtaaaactagcagagtttgtggagctgccgcagccggtcagggcaaaaagaaacgcagcagccagcaccgctgcggtaaaacgcaaccatcgtttcaaaaagaacaacctcattccgttcatcttcgcgcagaaacggcaaaaaacgctctgcaacgacaagtgtagcagaaagcagcagaaaaaacaattgcctttttgtgaatttaccgagctttttgaagcagactgtgcggttttccgttgccaattgcgcgcaaatggactataatggtacagcaaagtgatccccgcgctgcctgtgcggcgcggtgttataccatgatcctatagaggaggaactgtttttatgcagaaagatcagcagaagcttgcccagcttattcagggcaaaaaggtcgcctttatcggcgcaggcgtcagccataagaccctcatcaaggagtttgtggaactggacgctcatgtgaccctgtgcgaccagaaaaagagcgtggaggactttggcgattacgctgcaaccatccgggaactgggcatcgacctgagccttggcgaaaactatctggacggcttcaagggacaggacatcatcatgcgcaccccgggctttgtgggctactttgaaaagcccctgcaggatgccatggctgccggcaccatggttaccagtgaggtggaactgttcttcgacttctgcccctgtgagatcgtggccgtgaccggctcggacggcaagaccaccaccacaacccttatctccaaattctacgaggccgcaggccgcaaggtgcatttgggcggcaatatcggcgcagccctgctgcccatgctgccggaggtgtccccggaggatgtggctgtggtggagctttccagcttccagctgatcagtatgcacgcaagccccaacattgccgtggtcaccaatgtgaccccgaaccatctggatcaccacaaggatatgcaggaatacattgatgccaagcgcaatatcctgctgtaccagaagcagccctgccgcgccgtgctggggtatgagaacgagatcagccgctccatgcaggcagactgcaagggcaagcaggtgtggtttacccgcctgcatgatactgacaacggtgccttcctgcgcaaggatgggatgctctgcatggccgaggatggcgtcgtgacccccttccttgcccagaaggatatcaagctgcgcggtctgcacaacatcgaaaacctgctggctgctgccgctgccgtgtggggtgaggtgcccgtagaagccattcgtcaggtgggcagcaccttcaccggtgtggagcaccgcatcgagccggtgcgtactctggacggcgtgctgtactataacgattccatcggcaccagccccacccgcaccattgccggtctgcgcagctttgaccagaaggttatcctcatcgcaggcggctacgataagcacatcccctacgagccgctggcaccggagatcattgcccatgtcaaggacttggtgctgatgggcgctaccggcccacgcatcgaaaaggctgtgcgggagtgccccagctttgacgagactgcgctgcccattcagcacgcagatgatatgcagcacgccgtagagctggcgcgcgccgccgcaaagcccggagatatcatcatcctgtctccggcaagcgcctcctttgacctgtaccccaactttgaggtgcgcggccgcgagttcaaaaagatcgtcaacgcgctcaagtgatcgcacaggtaaaggatgcaaagcgccgcacccggttcgcaaatgcctgccggggtctgccggtgctggacgctctgctgccgctggactgcgcgctctttcgcaatagccagccatggcggttctatgccggccctacgctggcactggaactttccggcagtacggcatggctggccgggcacgcaaaccccgcagagctggcaagctttttatccttctgcgggtgcgaaggcgccattctggacgaagccgtctgcccgccgccggacggctggcacaaggcagaaacgttgacggtgttcggcttgccgcagggcgggctgctgcccctgcccgccgtggacgaagctttgtgggcgcagctgaccctctgccgggaagcgcccgccgcccgggtggcacaggcgctttaccccgcagactccgcccggcaggcggatttttactcagagctatgcacaaagcgcagccggggcagggcagtggcatggacgctggagcaggggagtacagtcgtctgcactgtgggcgcttatgccctgtgcaacgggcaagcctacatggcctgcgggcagaccgcagagccgctgcggggcaagggcatcggcgggctgctcattgtggaaatggcaaacagtcttgccgccgaaggcttgcacccggtattcctctgtgcaccggagcgggtgcggttttatagccgtctcggctttgcaaagcaggccgagtacgcccgctatgtgcccgagaaatgataaagcttttacacaaagaacccaaaaataacaggaaggaactatcacgttataatgtcgattctgaaccacttttttgattataagcccgaggtgctggcgctggacgaaaaggctatggagatgtgccagccctacttccgccagatggaggaaatccgggatttcaaccagctgaagatgctcaaggcttttgccgatacccagatgtcctccaccgatatgctgggcaccaccggttacggtctgtgggataccggccgcgccaagctggagcagatctttgcacaggtcatgggcgcagaggacgcgctggtgcgcagccagttccagagcggcacccacacgctggcggtggcactgttcggtctgctgcgggcaggggataccctgctggccgccaccggccgcccctacgatacgctggagggcgtcatcggtctggacggcaagggcaagggtaccggcaccctgatggactacggcgtaaactacgacgaagctcccctcaagcccgacttcaccccggattatgacctgattgcccagaaagcccccggcgcaaaggtgtgccatatccagcgcagccgcggctatttacagcgcaacgcctttgatctgtctacaatccgcaagatcgccgataccgcccgcgccgcaaacccggagatcatcatctttgtggacaactgctacggcgagttcacccagacgcaggagccctgtcaggtgggcgcggatatcgccgtgggcagcctgatcaagaaccccggcggcggcattgctcccaccggcggctacatcgtgggccgcaaggatctggtggaactgtgcgcttaccgcctgaacgcccccggccttggcaaggagctgggctgcacgctggagaccccccgggatatgtatctgggcttctactacgcccccggcgtggtgtgcgaggccatcaagaccgctatctacgcccagtgtatgctggagctgctgggcaaaaagcccattccgcgctactgcgaggatcacaacgatatcgttacctgctttgatgccggcacggcagaggcgctcatcggcttctgtcagggcattcaggccgccagccccgtggacagctacgccgccccggaacccagcccggagccgggctataccgacgaggtggtcatggccagcggcagctttacgcagggcagcaccatcgagctttcctgcgatggccccctgcgtgccccctatacctgctatctgcagggcggcttgaactttgccgccagccgcgccggtgtgctgctggctgtccagaaagcatattttaaggagtaatgtttgcccggcgggcaaataacacgcaaacaaaaaggagctatcgcacaacacgctgcgatagctccttttttccctctatacacaaagtaacacacaaataaacgcttacacggcacgggcctgcacggcggggatcggctcgatcaaggccgggtgcattccctcgcggtagtccagatctccctgatccagaccacgcagcagaacctctgcggtagcaatgttggtggcaatagggacgctgtgcatatcgcacaaacgcagcagattctgctcggtcaggctggcggcatcggccttcagcgggtcgcggaagaacagcaccagatccacctcatcgcaggcaacgcgggaggtgatctgctgtacaccgcccagcttaccggagaggtagcagtgcaccggcaggccggtggtctgcgcaagcatccggccggtggtaccggtggcgataacattattgcgggaaaggatggcactgtaagcggtacagaattgcagagccagttctttgcgggaatcgtgggcaagaattgcgatcgtcataggatgctctctcctttacttatttttacatagtaccagttgtgatgtacgaattttgaaatcctgtgaaacgggagtgaaatcgatatcaaatcttacaatatagttttaccgcatcaaaaacgctctgtcaagagaaaattttgcttttttgacctataaaaacataaaagtcctacttttacattgtgagaaacggcgaattcttggatacataccactatccaaggacatccattttctgggaaaagtgaaatatttttcactttatgtgcttgttttgaaacacagtccatcccggtaaaacaaaaatacaggccgaagcagcttgcatcggcctgtacaggaaatttttttcaactgtgaaaaacttgctctgccgcgcccgcaggccggacagaattgtaaaaaaattatgaagaagccggggcaggggagatcagcggatctgcccgtcaccgtggataacgtacttgtagctgcaaagctcctccagtcccatgggaccccgggcgtgcagcttttgggtggaaatgcccatctcgcagcccagaccaaactcgccgccatccgtaaagcgggtggagcagttcacatacacggcggcgctgtctaccgcagcggtaaagcagtcggcgtctgcctgtgtctgggtcaggatagcctcgctgtgaccggtggagtgctgtgcaatgtgagcaatagcttcgtctacgctgtccaccaccttgacggcaaggatatagtccagaaactcggtgtcaaagtccgcaggaccggcaggtgtgccgggaatgatggcggcggcgcgtgtgtccagccgcagctctaccggcagcttgcccgcagcaacgcggtcggggccaagacgctgcgcgagcttgggcagaaactcctgcgcaatggcagaatgcaccaaacaaacctcctcggcgttgcacacgctggggcggctggccttggcgttttcaataatgtccagcgcctttgcctgatcggcggtatcgtccacaaaaatgtggcagatgccggtaccggtctggatgcagggcacattggcattctccacgcaggcgcggatcagccctgcaccgccccgggggatcagcagatccacatagcccacggcagtcatcagggcgttggcggaagcgtgtgtggtgtcctcgatcaggcagaccgcgttttccggcaggccgttctcccgcagcccctgccgcagtgcttgcacgatggcgttggcgctgcgccatgcctccttgccgcagcgcaggatgcaggcgttgccgctcttgatggcaagggcggcggcatcgctggtcacgttggggcggctctcgtagatgatggcgatcacacccatgggcacggcggtcttttcaatcaccagcccgttggggcgctccacccgcttcagcacccggcccaccggatcgggcagggcggcaacctcttcaatgccctttgccatggcgcggatgcgctcttcggtcagggcaagacgatccagcatcacctcgctgatatgtccctttgcagcagccatatcatcggcgttggcggcaaggatcgctgtcatgcttgcggggctgcacagctgcgcagccatactgcgcagtgcctgtgcgcggacggtgccatcagccagtgccagcgcagcctttgccccgcgggcggcttccagaatttcctgtgttgtcatagctcaaacctcctgtgtggacagtgcgggctgcttgtgcccggcaaagcgggtgccgatgggcttgcccgcagcgatatcatacagcagttccgggtgtgcgccgttggcaatgaccatatccgcgccgctgccggtcaccatgcgggcagcgcgcagcttggtagccatgccgccggtgcccagtgccgaacctgcaccgtctgccagtgccatcacctccggggtgatctcttccaccagcgggatgagtgccgcatccgggtgggtgtgggggtttgcagtgtacaggccgtcgatgtcgctcagcagcacaagcaggtcggccttgcagcagcaggccacaatagcggccagcgtgtcgttatcgccaatggaggtgatctcatcggtggcaacgctgtcgttctcattgatgatgggcagtgcacccagctccagcaggcgggtcagagtgttctggatgttcacccggcgctcggtgtgctccacgtctacgccggtaagcaagatctgcgctaccgtgtgatcgtaggcactgaacagccggtcgtaggtgtacatcagctcgcactgccccacggcggcgcaggcctgcttggtggtggtatccttggggcgtgcaggcagcgaaagcttgcccacgcccatgccgatagcgccggaggacaccagaatcacctcgtgtccctcgttctttaaatcgctcaataccttgaccagttcctctgcatggcggatgttcagccgcccggtggggtatgccaatgtggaggtgccaactttcacaacgatgcgcatgattccattaaccctttcccatttcctttgttttgtcgtaagcagccagcacggcatccatcaccgcaccgcgcagcccgtgttcttccagtacccgcacgccctgaatggtgctgccgccggggctgcacacagcgtccttcagcgcaccggggtgcttgccgctttccagcaccagctttgcgctgcccagcaccatctgtgcggcgtactcctgtgcctttgcccggggcagaccgcaggccacgccgccatcggccagcgcttcaataaactggtacacccatgccgggccgcagccggaaacgcagcttgcagcatcgatcatgccctcggctacggcgtccagacgcccggcgggagccatcagctgacagaaagcttcctcttcctcggcggtcacgttgacggagcagtactggatcatgccttcacctaccgatgccggggtgttgggcatgatgcggatgacggggtagtcgccgcccgccatctcctgaatgcgtgccaccggcaggccggcagccatggtgcacagcacgaaccgattgctgcgctcggcaaggatgaaccgcagcggctccagcatggcttccatcatctggggcttcaccgccagaaagatcaggtcgcagtcaccggcgacctcggcgttggtagccgtttggcagcccagttctgctgccagcgcctcggccttggcagccgtgcggttcgccagaaatacattctcaggctcggtagccttgcacacggcgcgggcaatagccccgcccatgtttccacagcctaaaaacccaatggttttcatcataataataaccctccctcggcaggtatgcactgcataaaattctgcttcttattcattctaagcatagggcgggagaaaatcaagacttttgtcttattttgggcggatataatgtaaaaacagcactttcgcagcgggcagtgcacacacaaacttcataaaaaggtaagaatctttacttgaaataaggtcacattttgcggtaaaataaatcatggggtatcattcacggaaacggcagcggcgactgccgggaaaggatgggtttttgtgtcacaaacgacaaaacgggcactggaggcatctctgaaaaagctgctgctggaaaagcccctgaacaagatcacgatcaacgatatcaccgaggactgcggggtgaaccgcatgaccttttattaccatttcaaggacatttacgatctggtggactggatcttggcagaggatgccgccaaggcgatggaaggccgccggggctttggtacatggagcgaagcctatctggacgttctgcaccagctgcaggacaacaagacccttgtgctcaacgtttaccgctcggtgggcagggaacaggtggaacagtatctttatagattgctggaccccatcctgaaggactttgcagacagtgaatgccacgatatcaccgtgcaggatgcggacaaacagttcgttgtcgacttttacaagtatgcactggtaggcatgacgctggaatggacccgccgggatatgaaaggcgaccccaagaagatggtggagcgcgtgagcaccatgatccacggggatttccgccgggcgctgtgccgcttgagcagcggtagcctgaaaatagaggaatgatgtgctttgcggctgtgcggcttcaataaaattttatcaaagggtacgctgtgatgggttttccatcacggcgtattttctgtttatggcacaaaaacacgcaaagtagtatgatgtggtcaagcaaaataagaatttccaaaggaatcatttcgggaggaaaagttatgaatacatctcttgagaacctgacccacaagatgcagcgtgctgcacttggtaaaatagtggacgtggcgctttcccgcgccgagcaagaccgtgaaaaaacaatgtgccagctggtagatgctgcaaagcagttctacggcagcggcttcagcgacgagacctacgagaacgccaaaaaggtgctgaccgaccccgacagcaagtggacgaaacttatcaactgcgtgctggatcagaccgacccccatgtggcgcgtaccaccgcgctgaatctgggctacgaagccttcttccgcggcactaagatgatccgcgagaaccgtgtcaagtaccagtgcaacatcccctggctgattttgttcgaccccacctctgcctgcaatatgcactgcgtgggctgctgggcaggcgagtacggcaacaagaacaacctcagctttgaggacatggacaagatcgttacgcagggcaaggagctgggcgtgtacctgtatatgctgaccggcggcgagccgctggtgcgcaagaaggatgtgctcaagctggcagaaaagcacaacgatgtgcagtttgccatctacaccaactccaccctcatcgacgagccattctgtgaagaggtgcagcgtctgggcaatatcgcctttatgctgtccatcgagggcaccccggagaccaacgatgcccgccgcggcgaaggccattatgccgctgtgatgcacgccatggatctgctcaagaagtacggcatcctcttcggcacctccatctgctacacccgccagaacatcgacgccgtcaccaatgacgcgttcatgcgtttcctgtgcgagaagggtgcacacttcggcttctacttccactatatgcccgtgggcaacgaggccgccccggagctgatgcccaccccggagcagcgtaaatatatgatcgaccgcatccgctatctgcgctcttctgcgtgcgatatcccgttctaccccatggacttccagaacgatggcgagttcgtgggcggctgcatcgccggcggccgcaactacttccacatcaactctgccggtgatgctgagccctgtgtgttcatccactactccaacgctaacatccacgaccagtctattctggagattctgcacagcccgctgttcatggcttaccacaacggccagcccttcaacaagaaccatctgcgtccctgcccgatgctggaaaaccccgagctgctggaaaagatggtgcacgagaccggtgcccacagcaccgacctgcagtccccggaaagtgtcgagcacctgtgcgagaagtgcaaggcttacgccgccgactggcagcccaccgcagacgaagtgtggtcccaccacaagatccgcgagagccggtatgagaactataaggattggaagccctctcagccgctggattgagctgaaatctgaatcaaagcaataaacgacccccgccctgtgttcctgactggaacataaggcgggggtcttgctgtgcatgttggcggctatttatttcttatcgctttctttaattgcctttagaatacaaattcccatagctaaaacaggaaacagcactctgagagctaaaaacccttgtgggtctccaaaatcgatgtttgcgtctgcaaatagcccaacgaaccatgccgctaaagtagaaatgatcgcgattgtgtaagtcatttgtcaaaccttcgtgaattatttctcggttgtgtttttgccccgtacaagcataccggcaattgtgattaaaagacctgcggctccaccaacaaaagcaaaaatattacttatagataaggcaatcccagccagaataacggcgatacccaataacatcattttaatacccattaaatcgttctcctttatatacgttcttataatacggcatggctaaaaaataccccgcatcggaagtgctctgatgcggggcagggaagggttactggttttcagcaggttgcggtgcagcgggctgtgcggctgcatcgtctgcggggtcgccgaactggtcgtgatagctgttcagcagggtcagctcctgattgcgctgcaagccgtggatgaccagctttttgatgacatcgtagataacggcaaacagcggcacgccaacgatcatgcccacaaagccccacaggccgccaaacagcaggatggcgaacagtacccagaagctggaaaggccggtggtgttgcccagaattttgggtccgatgatgttgccgtccagctgctgcaaaatcagcacgaacagcacgaaccacagcgccttgatggggctctggatgagaatgagcagggtggcgggaatggcaccgatgaaggggccgaagaaggggatgacgttggtcacaccgatgatcaccgacaccagcagcgcactggggaacttgaagatcagacagccgatatagcacagcacgccaatgatggcagaatccatgatcttgccgttgatgaagccgccgaacatccggtctgcgtatttcacttcctcggtgatcagctgcgcccagcggggacggacgatgctgtgcagcaccagcttgccctgctggacgaaccgcttgcggctggccagcatatacaccgccacgatgatgccgatgatcaggttcttggccaccgtcaccacgttcagcacgccgatggctgcgccgcttacgatgttctgcatggagggcagcagggtgttcttgatccacgtgtcaagattggtattcagggcagcataggccgaattgagcagctccatgatctgttcgttgttttcaataaactccagatggtttgcccagtacatgaaccttgtaatgttggcctgcgcggtgtagtacagggtcgtcacgctggtgatcagctgcggcacgatcatcatgaccagcgcatacaccagcaaaagtccgaacaggatggtgagtgccacggatagcgcgttgatcagaccattcatcttttccgggatgaaccggcgcagaaagttttcgatgctgttgcataccggcttgagcagataggcaatgacggcaccgtagataaagggcatcaggatgccggtcagggtagagatagctgagccaaagccgtcaaagcggtagataaggaaaaagaagatgatgctcagtgcaatggcaccaaaccctgcgagcatcccatagagatacggtttgatgtgcggctttttgtccatcatgacaaactccattcctgctgcgggcagcgggaatacccacagcgcttattaaattttgttgcttctgcgccagatgtgcagcttttcagcctcgcggatcagctcctcgcggaagtccgggtgtgcgacgctgatcagagcctcggccttttcccaggaggtcaggcccttcaggttcacgcagccatactcggtgcacaggtagtgcacgttggcgcgggtgtcggtaacgatgctgccattctccagcgtgggacggatacggctttccagctggccggtctttttattaaagaaggtggaggacaggcagataaagctcttgccgcccttagaaaggtatgcgcccagcacgaagtccagctgaccgcctgcaccggaaatgtgcttcacaccggcgctctcggcgttcacctgaccaaacaggtcgatatccacggcattgttgatggagataaagttgtccagtgcggaaatgctgcggatgtcgttggtgtagtccaccggggcagacatacactccgggttatcgttcaggtaatcgtacatcttctgggtgccggcaccaaaggcgtagacctgacggcccttgtccagctgcttgcggctgccgttgatcttgccggccttggcaatatccacaaaggcatccacatacatctcggtgtgcacgcccagatccttcaaatcgctctgcgcgatcagcccgccgatggcgttgggcataccaccgatgcccagctgcaggcaggcaccgttggggatctgcggcacaatgaggttggctaccttcaggtccacctcggtagcggcaccggcagcagccatctgaccgatggggggatttgcgccctccacaatgccgctcacctgagaaacgtgtacgcagttctccatgccgccaaggcagcgcggcatattggtgttgacctccacgatgatcttcttggccttttcacacacggcacccagatgcgaagcgctggggccaaagttgaagtagccgtgctcgtccatgggggtcacctgaaatactgccacatccacggggtcactgctctcgcggtagtagcggggcagctcagagtagcggatgggggagtagaaggagaagccctgcgcaatggccttgcgctcaatgccgcccatgtgccagctgttccaagtcatgtgggcagcggggtcgtcgatctggaagatctccggcacccacatcaggatgccgccccggaagttgaccccttccagctccggcaggcgctttgccagctcggcatccacggccacaggggtgttcacagcccagccgtaatccacccagtcgccgcttttgaccagagcggcagcctgcgcagcagtcataagcttctgtgcgtacagttccttgcaatccattataaaccatcctctcttaaaatacataaaagaattgtaaacaattctgtgcggacaaatgatgcagctgttttacgcctgttttacgcctgttttgcggaatgcacaccgttttgccacatctgtatggtaaccttataaacaaggcagcagtgtgtgctcagctccgcgcagaacagctcaacttagttataacattaacaaagtgtagaatcaatagttttggctaaaaaacagccagtatagcataataaacagttttcttagctttatgtggggattgtttggtacgcaaaaaacaaaaaagttgagaaaaagtcttgataaaattttgacgatgtgctttactaatagcgtgggaagcaactgcggagcagtgcggaatggttcgtttaaaatttaacgataaatcgcaccgcagcagtttcaggttgcacccaaagctggaaagtgctatcatggcagaaccacatcgcgcttagtaattacagcgcacaaggaggacactgaccgatggcaacagcagtttatcccgggtcgttcgatccggtcaccaagggacatcttgatatcatcaagcgcgcagcaaagatcaacgaccacctcatcgtggcggtgctgatcaacagcgccaagcatccgctgttcacagtggaggagcgggtggctatgctgcaggaatgctgcaagaacatccccaacgtgaccgtggaaagcttcgacggcctgaccgtggagttcgcaaaaaagcgccacgcatccgtcatggtgcgcgggctgcgggcggtaacggactttgaaaacgagatccagcttgcgcagaccaaccacgcactgatgcccggcatcgagaccatgttccttgccaccagcatcaaatggagttatctttcctccaccattgtaaaggaagcagcgtattacggcagtgacatcagcaagttcgtcacacccaatgtggaaaaggccgtcagcgaaaaatacgcccagctccgggagagggaagagacctgatatcgcaaaaatgccgcagggcgttttgataactgggtaaccgataagtaacacacatacacaattcaggaggctattcacatgaaaaagatcgttatcgcatctgcatgccgcaccgctatcggcaagttcggtggcactctggccaacgttcccgctgttgagctgggctccatcgtcatcaaggaggctctggaccgtgcaaacgtcaagcccgagcaggtcgatcatgtttacatgggctgcgtcattcaggctggtctgggccagaacgtcgctcgtcaggctgccctgaaggctggtctgcccatcgagacccccgctgtcaccgtcaacgtggtctgcggctccggtctgaactgcgtgaacatggctgctcagatgatcgaggcaggcgatgctgatatcgttgttgcaggcggcatggagaacatggatatggctcccttcgcactgcagaaggctcgctacggctaccgcatgggcgctcccatgggcaagagcgagatcgtggataccatggtcaacgatgcactgtgggatgcctgcggcttcaacaagcacatgggcatgaccgctgagaacgtctgcaccaacgagacctaccagaagaagtacggctacagccccatcacccgcgagatgctggacgagttctcatacaacagccagctgaaggctgacaaggccatcaaggacggcgccttcaaggacgagatcgttcctgttgtcatcaagggcaagaagggcgacaccgtgttcgataccgatgagggtccccgtctgagcgctcccgaggttctggcaaagctgaagcccgccttcaccaaagacggcatcgtcaccgctggtaactcttccgccatcaacgacggcgctgctgctctggtcgtcatgagcgaggagaaggctaaggaactgggcgtgaagcctctggcaacctgggtcgccggtgctctggcaggcgttgagcccgaggtcatgggtctgggccccatcgctgctaccaagaaggtcatggctaagaccggcatgaccgttgctgatatggatctggtcgaggccaacgaggcattcgcagcacagtccatcgctgtcggcgaggctctgggctttgataaggacaagctgaacgtcaacggcggcgcaatcgctctgggtcacccggtcggcgcttccggcgctcgtatcctggtcaccctgctgtacgctatgaagcaccgtggtgctcacaagggtctggctaccctgtgcatcggcggcggcatgggctgcgctaccatcgttgagatggactaagcactttttctctgaatcctgattgaaccacagacccggagcgccggagggaaccggagagccctcctgcgttccgggggctgttttgaaaaaactgaactgtatgaaatggaggttttcacaatggcatttgtaaaaaccgaggtgcagggcgctgttgagatcattaccatcgaccgtcccaaggcactgaacgccctgaaccctgaggttctggctgacctgaaggctgcttttgaagcagtcgatcaggagactgtccgctgcattgttctgaccggcgaaggcgacaagagctttgttgccggtgccgatatcggctccatgagcaccatgaccaaggcagaaggcgaagctttcggcaagctgggcaatgatgtgttcctgatgatcgagcatttccccatccccgtcatcgcagccgtcaacggctttgcactgggcggcggcaacgagctggctatgagctgcgatttccgcatctgctctgacaacgctgtgttcggtcagccggaagtcggtctgggcatcaccccgggcttcggcggcacccagcgtctggctcgtctggtcggcatgggtatggcaaagcagctggtctactctgctctgaacatcaaggctgacgaagcttaccgcattggtctggtcaacgccgtgtatccgcaggctgagctgatggagaacgtcctgaagctggccggcaagatcgcaaagaacgctcccattgctgtgcgcaactgcaagaaggcaatgaacgacggcatcagcctgcccatcgagaaggctgttgaggtcgaggaaaagctgttcggcgattgcttcgagacccacgaccagcaggagggcatggcctgcttcctgtcccgtgagaaaccgaagcccaaggcagtgttcaccaacaactaatccattacataatttttgatattaaaggagagatttcctatgaagatcggtgttatcggcgctggcactatgggtcagggcatcgcaaaggcatttgcacaggttgagggcaacactgttgctctgtgcgacatcaagcaggagtgggccgagaatggtctggcaaagatcaagaagggctacgagaaactggtcgctaagggaaagatgacccaggagaaggctgacgcgatcgtcgccgccatcaccccgggcctgaaggaagatctgtgcgcagactgcgatctggtcgttgaggctgctttcgaggatatgaaggtcaagcagaccaccttcggcgagctggacaagatctgcaagcccgagtgcgtcttcgcttccaacacttcttctctgtccatcaccgagatcggcaagggtctgacccgtcccctgatcggtatgcacttcttcaaccccgcagaccgcatgaagctgatcgaggtcatcgccggctgcaacacccccgttgagaccgttgagaagatcaaggagatctccgttgccatcggcaagacccccgttcaggtcaacgaggctgccggctttgtggtcaaccgtatcctgatccccatgatcaatgaggctgccttcatcaagatggagggcgtttctgatatcgccggcatcgacaccgctatgaagctgggtgctaaccaccccatgggacccctggaactgggcgacttcatcggtctggacatctgcctggccatcatggacgtgctgtacaacgagaccggcgacagcaagtaccgtgcctgcccgctgatccgcaagatggtgcgcggcggcaatctgggctgcaagaccggtaagggcttctacgtttacaacgcagaccgcaccaagaccccggttgaccagctgtaagttctgataaacatttctcccggctgcggggaaagcagtcgggaggaatttgtttgcaccgggctattccggtaaatgaaaaaagacctgttaggaggatatagcgatggattttactctgtccaagcagcagcagatggtgcagaaaatgtaccgcgagtttgctgagaacgaagtcaagcctctggcaaagaaggttgacgcagaggaatacttccccaaggagaccgtcgaaaagatgggcaagctgggcatgatgggcatctatttcccgactgaggtcggcggtgcaggcggcgatgtgctgtcctacgtcatggccgtggaggagctgagcaaggtctgcggcaccaccggtgtcatcgtctctgctcacaccagcctgtgcgctgcccccatttacgagaacggcacccccgagcagaaggctaagtatctgccgaagctctgcagcggcgagtggctgggcgctttcggcctgaccgagccgggcgctggcactgatgcgcagggtcagcagaccattgccaaggaagaggatgactgctgggtgctgaatggctccaagatcttcatcaccaacgccggctttgctgatgtgttcatcgtcatcgccgttaccgataacgtgctggataagcgcggccgtcccaccaagctctgctccgccttcatcgtggagcgcaccgacccgggcttctctgttggtaaggcagaggataagatgggtatccgcggttcttctacctgcgagctgatctttgaggattgccgcatcccgaaggatcgtatgctgggcgtgcgcggcaagggcttccagctggctatggctacgctggacggcggccgtatcggcatcgcttctcaggctctgggcatcgccgagggcgctctggaggagaccgttgcttacgtcaaggagcgcaagcagttcggtcgtgcaattgccgctttccagaacacccagttcgagctggctgagatgaaggctcgtgttgaggctgcgaagtatctggtttatgctgccgctctgaagaagcagcaggctatggatggcgcaaaggttcgttacagcgtcgaggctgcacaggctaagctgatcgcagcccgcaccgcaagcgatgtgacccgccgctgcctgcagctgttcggtggttacggctacacccgtgactaccccatcgagcgcatgatgcgtgatgccaagatcaccgagatctacgagggcaccagcgaagtgcagatgatggtcatttccggcgcgctgctgaagtaagggaggcaagagttacaatgaaagcaattgtttgtgtaaagcaggttcctgatacctccggcaaggtgtccgtcaagcccgatggcactctggatcgtgcatccatggcaaccatcaccaaccccgatgacctgaacgctctggaggctgctctgaagctgaaggacgccaccggctgtgaagtcgttgttgtcaccatgggtcccccgccggcagagggtatgttgcgtgagctgctggctcgcggcgctgataaggctgttctggtctccggccgtgagttcggcggttccgatacctttgcaaccagccagatcctggctgctgccgtcaacaagatcggcgttggccccgaggacgttgtgttctgcggccgtcaggcaatcgatggcgataccgcacaggtcggcccccagatcgctgaaaagctgcatctgccgcaggtcacctacgttgccgacatccagaaggacggcaacaccctgaccgtgaagcgtatgctggaggacggctacatgatggtcaaggtgcagactccctgcctgctgacctgcatcaaggagctgaacgacccccgctacatgagcgtgaacggcatctttacctgctacgacaagcccatggaagtgttcgactacaacgcattgaaggacgatccgctgatcgaggtggacaccattggcctgaagggttctccgacgaacgtctttaagtccttcactcctccgcagaagggcgcaggcaccatgctgcagggcgacgatgttgctgcccagctggctggcatcctggccaagaagcacctgatctgatgaaaggagcataggattacaatggctgattttaacgaatacaagggcgtatgggtcttttgcgagcagcgccagggcgcactgatgtccactgacttcgagctggttagcgaggcccgtaagctggccgacgagctgggctgcgaggtcaccggcctgctgctgggcgacaacgtggagggcattgccaaggagctgggcggctacggtgccgacaaggttctggtgtgcgacagccccctgctgaagaattacaccaccgacgcatacgctaaggtcgtgtgcgatatggtcaacgagtacaagcctgaggtgctgctgatcggcgctaccaacatcggccgcgacctcggcccccgctgcgcagcccgtctgcacaccggcctgaccgccgacgctacccatctggatatcgatactgcaaagtacatcgacttcctgaaggagagctccaccatcgacctgtccaagcagaagttcgatatggaagaccgcaacctgaagatgacccgtcccgcattcggcggccatctgatggctaccatcatctgcccccgcttccgtcctcagatgtccactgtgcgtcccggtgttatgaagaaggctcccttcgatcaggccaaggctgatgcctgccagatcgtcaagcccgccttcagcctgaccgctgaggacatcaagaccgaagtgctgagcgtggagaaggccgctgagaagctggtcgacctgatcggcgcagacgtcatcgtctccgtgggccgtggtatcagcaaggatgtcaacaagggcatcgagctggccgagcagctggcagccgctctgggcggcggtgtcgtgggcgcttcccgtgccgtcaccgatgcaggctggatgaccgctgaccatcaggtcggtcagaccggcaagaccgtgcaccccaagatctatgtggctctgggcatttccggtgccatccagcacaccgccggtatgcaggattctgagtgcatcatcgccgtcaacaagaacgagggtgctcccatcttcggtgttgcagactacggcatcgtgggcgacctgttcaaggtcgtgcccgagctgatcaagcagatcgaggcagcaaaggctgctctgtgatcatctgtccccgagcatatttacaatagcatagcctgaattgtgggagggcggttcttcggagccgctctccttttttgcgtgccgcttacaccagccgccgggcaagccattccagccgctccacctctacctgtgcgcggcgcagctcgcccagcgcatcctcggtggcctgctgctcaaggtatccgtccgccgcccgcagtgcagcttccagctctgtgtagtcagcagtgcgcaacagatggctcatggtctggcgcatggtgtcgcacagctctgcgccctcggcaagcgcctgtcgcgcagtggggagatccttctgccgcacagcttcaagggcacagtccaagtcagccgagatatcctgcgcaaagccctgcacccgtccgctgctataaagagatatccccagcagcgcagctacgatcaggatacacgcatagatccgcttcatcgtttccctcccggctgacggccttcttttttcagcagaaaatagtcctcggtctcgttgccgataagcagtaagatctcctgcggcaaaaccgtgtttgccgtggcggtgcgttccagccacgcacggtctttgccgcaccagcgcagattatcctccagcacctgtccgtccagcacaaaggggatggtggcctgtgtctgctgcaccttcagctgcaagtcggacagggtggctgcttcctgctccgggcgaagcgccgccgacaatgtgccgttcgtttcaattacggcgtaagacaccctgcgtgggtcaaagatatccttgccgcgcagcgcctccatcaggtcggcggtggtcagccgcagcatccgcaaagcgttctgatcgatctttccatccagaatgaccgttttaggtcgcccggagagaaaattgaagaatttctggctgcggaagctcaccactgaacccagcagttccagcgccgcaatgaggaacagcgggatgagactggcggtgatgggcacatcctccgattcaatggagatggacgccagattggagatcaggatggtggataccagctcctccggctgcaactctcccagctgacgcttgcccatcagccgcatggcaaacaaaacgcagagatacaggataatggtgcggcaaagcagcagtttcatgcacaaaccctcccggtgcggtgtgcgcggcgtattccgctgcggcaaagcgggcatactgcacacacaaaggagtgatagatgtgcagcagctttcgcaaagccttgcggaaaacctgtccgcgcttgatgctaggtttggcaagtcggcagattattatgcgaagaagatcgttttatatggctgtccgggatgtatcgtaatgtttgacggcatggcaagcttagattcgctctgggaactgctgctggacgctgccggacgccagtctgcttttgtccggcttaccggcgcacaggcctatgcgtatatcctgcacgggtcggcttttccggctgagagcgccccagtgcaggatctgccgcagcttgtagcgcggctgacagccggcatggctgtgctgctgttagagggatgcagcagcggtattgttttttcggtgcaggggctcaagttccgctctgtggaagagccatccggcgagggtaatctgcgcggcagcagggaaggctttaccgatctgctgcgggtgaacctgagccttttgcgccgtcttgtccgcaccgacacccttgtgcaggaggctgcacaggcgcacacctgctgcaatacagagtacgccctttgctactgcaagaaccgtgccgaccccgccatggtgcgccgggtgcgtgccattttgcaaagtgcaaggccggagctgctgctggattccagctattttgtgccgtggctgctgcccggcaaggcgcggctgttcaccccggtacactataccgagcgcccggcggtcgccgccgcgaagctctgcgagggcaagctggtaattttggtcaacggcagcccctcagcgctggtgctgccggcgctctttagtgaacagttcgagtgtctggatgattacgcgtctacggcggcgttttcctcttttctgcgggtgctgaaatatttttctttctaccttacggtgttcttaccgggggtctttgtgtgcgtggcggtgtatctgccggagcttttgcccccgcagctgctgtataagatcgaagcagccgaaaaggctacgccgctgcccctttttgccgagatgctgctggtgatcctgatcttagagatcatccgggaggcggggctgcggatgccgcagtcgctggggcactcggtcagtctggtgtcggcgctcatcatcggagacgccgccattgccactgggcttatgagcaccccggtcatctttgtggctagtattacggccattgcggtctttgtcaccccgggactgtatgagcccgccacccttttgcgcatcggcacggtgctgctggcagggcttgccgggccggtagggctggcagcggcgtttttcggctttctgctcagtatcgtcagcaccgaagcactgggcgtgccataccttgcgccgcatccgttcccacagcagccgctttccgaggatggtgttctgcgccgcaactaccggcagctgtcccggcacgggttcaatatctggcaaaagcgggagagggggaagcggcagacatgaagcagaaagcaggatattttaccccagcagcgctgaccctcagcgtggtcacggcagcgctggcagatggcatcccgcagggtgtcccggtgcgccgggcactgtggctgggcgcagtcagcacggtgtgcctgtgcattctttcagcgctggctgcggcggcgttgctgaacaaagcaccctccttcgcggtacggttggcattgacagcagggctttttatggagctggcacacatcatcgtgcaggcacaagggctgtgcgcggcagagttttcctccatggcgctgctgggctttctgccgctgctgctctgggcggggtggggtatccgccccgcaagctggaacgcctcggcgcgggtgctgtggtggtttgccgccgtgggcggcgttatctgcctgcttgggcttgcaggacagctgcactggtaccggttgttcaccccggcacagccgactggaacaaactggagcgtaccggtctatgcagaatactttgccggagcccttttgtgcagcgcgcggtcggtacggcgcacggtctggctgccggtatggggctttgcggtgcaggcggcggccttgctgggcggcgctttgctgtttggaagcggcgcatacccccggttggagctgctgcgggcgtggagcggcggcagcttttcccgcatggatgcactgcttttgctgctgtggctgctgtgcgctgtctaccgggcggccatgctgtgtgccgctatccgcttgctctggcagcagccggaagctgaggtgcagccatgagaaatgcaaaatcttacaagccgctgctgtttttactgctgacagggtggtgccttttgttcctgcggtgcgagagcaccgagaaaagcatggtgcgggcagtgtatctggcacagagcgaacaggggtatcaggcagggctgctttatcaggcaccgcaggccgccgccgatgctgccgatgccactgctgcattgcagtttgtgcaggcagagggccaaacgatggagcgggcactggatgcggcagagcaggcactgccccaaactgcaagctaccgcctgtgtgattacctgctgctgtctaaagcggaagaacccttattaacagagtacgagcagctggtgctgcggcgcggctgcggacgcacggcggcaaggctgctttgcgccgaaggggagatagaccgccttgccgcacaggccgctttaccggacgccctgatggcacagctaaaggccgcagcgcccaccgcgccccggctgtatgagcacacagaaccgggacttctgccggttcttgggtggagcgcggaagaggtgaccgtacagaagggtggcgttctgcatactgtggccgctaatacgcccttgtccccggaacaggccgaggtgtaccgtctgcttaccgaacaaggcggcacccggcagctctggctggaaggggagcgcattggcatccggcgctgcaccgtttcggtcaccctgcaaaaggcgcaggtacttgtgtggctggactgtcagcgtgccgcccacagcccgctgcccacgcaggcgcagcagcaacagcttgcggcgcagtgcacggcgcttttgcaaggctgctggcagcagggcgtggatgtgctgcacctgcaagcccgggcagcgctgcgggacggcagcggcgcaagttttgacccaacaaaaaacgcctgcccgcaattgcggacagacgtgcatttcatgctgtattaagaggcagtggggaaggtaacggtgatggtggttccaacgtctatctgactttccagcttgatgcgggcattgtggatgcgggcaatgtgcttgacgatggcaagcccaagtccggtgccgccggtggccttgctgcggctcttatccacccggtagaagcgctcgaacacgctggactgcgcttcccgcgggatgccgatgccgttatctgttacggtcagggagcagtgtccgtcccggctgcaagcggtaatgatctgcaccttgccgcccggacggttgtagcggatggcgttgtcgcacaggttctggcacagttcatccagcagcgcgcggctgcccagcaccggggcactctcgcccagataggtcagggagatataggcgcggcgtgcgttcagtttctggcgctccacgcactctttggcaacatccaaaaggtctaccgtttccattaccggggcgtccccggtctcgcttacggtatccagtttggaaagctgcaaaatgtcgttgaccagctggatcatgcgggtggcttcgctgtggatcttgcggccgaaatccggcacatcctccggctttgcaatgccggtctcgatcagctctgcatagccggaaatgctggtcagcggggtcttgagctcgtggctgacattggcggtaaactcctgccgcattttctcgttgttttcccgcaggatgcggtcagaatggatgctctccgcaaaggggatcagctcccggtagggcacgttttcctgaatgtgatccagatcttcggtcatgttcagcaccggctgtaccaatgccttggtcagcagagcagccagcaccgcagcggccagcatcagcgctacacagctcagtacaatggccgggatagtggagtcgtagatagaccatacggtctcggcgtcctgcgccacgcgcagcacatccccgccggaaagccggagcgcgtagtaataggtctcgtagcccatggtctgggaatcgcggatgttccgtccctcgccgtttgcaatggcatcgcggatctccgggcgggtcagatgattttccataggctggtcggtggcagattcaaacagtacgctgccgtcctgactgatcagcgtcacgcgcagatcatcggtcacaaaggcactcagctgcgcgggatctccggtctgctcgtacccggcgcgcacaaggtcgctctcgcgctccagccccgaccacgcctgcgccgtaaaggctttatggaatacaaaaatgcacagcgctgcggtgaatataagccccagaaagcccatcaggaacaaccggtagctgattttttcttccatgctgcgcagcttcattcttcttcggcctcctcatcggtcagcttgtagcccaccttgcgcacggtgcagatgtaacgccccgcgtcgcccagctttttgcgcagggtgcggatgtgcatatccacggtacggctctccaccgagatgtcggtgccccacaccacctgcaaaatggtctcgcgggtcaccaccagactggtgttttccagcaacagccgcagcaggcagtattctttgtaggtcagctccacaggggtgctgtttaccgtaacgctgtggcgggcattatccagctggatctcatggaaaaccagtacgtccggtcttacctccggggcggagcgccgcagtgccacacgcacccggctgagaaattccataatgccaaaaggctttgcaatgtaatcatccgcgccgcagtccagcccgcgcacggtgtccagctcgctggattttgcagtgaccataatgataggcagcttgcgcagggaaggggtgttgcgcagttttttcaggatggaaaagccatcctcgccgggcagcatcacgtctaagatcaccagctccggttcagcggcacgcatggcctgccagaagggctcggcgctttcaaagccctgcacctcgtagccattggattgcagggcatactgctccagttcccggatggaagcgtcgtcctctacgatatagatcataactcaattctcctcagcagtctgtccgtccgggaacagataccgctcacggtagcggcccagacggcgatggaattcttcgctttccttggtgtcgttgccgtgacgcaggtcgttcaggtaggcgtgggtgtcaaagctgtcctgtgccacctcgatctgcgcaactgccacgttgctgcaatggtcgcacacacgctcgtagttggtcagcagatcgtccagcacaaaaccgtactcgatggagcagctgccggcctgcaggcgggcaacatgccgcgccttgatggcacgcaccagctcgttgaccacggcctccagcggctcaaccttggaagcaaggtgcagatcgctcttgcggaaggcatcggtggtgcggctcagggtatcctgcaccgcatcctccagcacctgcagctcctcctgtgcatccttggagaagtggatatccttctggtgcatctcctcggcagattccagcaggttaacggaatggtcgctgatgcgctcaaaatcgctgatggtgtgcagcagggtgttcacgctctggctgtcggcgtggttcagttcccggctggacagcttgaccagataagtgcccagcgcgtcctcgtaccggtccacccggcactcctcgtcccgcaccttctgggctagctcgtcgctccattcatgggtcaggctcatggcctgcaccacgcccacccgggcaagctcggccatttcggcagtagcggcgcgggcacgctccacagccatagcaggggtgttcagcagacggtcatccagcagagcaaactcctctttttccggggaatcgggaatagtcaggatagccagcttttccagcccagtggcaaagggcagcagaatgacagtggccagaatgttgaacaccgagtgcacgattgcaatgccccaggcctcaatggtggtattcacaaaggcaaagcggcagacagcgttgagcccgtagaacccgaacaggaagatggtcacaccgatgatgttgaagtacaggtgcaccatagcggcgcgacgggcgtttttgttggcacccaccgaggacaacagtgcggtcacacaggtgccgatgttctgacccatgatgatggggatggcactgccgtaggtgatgacgccggtggcgctcagcgcctgcaggatgcccacgctggcgctggaactctggatgatgccggtgaccagtgcgcccaccagaacgcccagcagggggttggagaagcgggtgaacagactggtgaaccatgcctcgttctgcagcggcagcaccgcgttggacatggtggtcatgccggtcatcagcacggcaaagccgataaggatagtgcccacgccttttttcttctcactcttacacatatacagcaaaatgccgataaatgcaagcaccgggctgaaagaagtaggtttgagcagctggatgaacaggctgtcgccctgcaaaccggaaaggctcaagatccagctggtcacggtggtgcccacgttgctgcccatgatcacgccaatggcctgatgcagctccatgatgccgctgttgacaaagcccaccaccataacggtggtagcgctggagctctggatgacggcggtcacgcacagacccagaaaaaagcccttgagggggttatcggtcagtttgctgagaattttttgcagctggccgccggcctgcttttccagtgccttgcccatgatgtccatgccgaacaaaaacagagccagacctcccagcagcgaaaagacattaaaaatggtcataagtgttttcctcactttatcttgacgtgtttttctcctgtgctttaagtatagaaaaataatgtaaaatttgaaatcgacgaaatgtaaaacccatgtaaagtaagaaaaatgtaaaaatcctgtgcacgggcagcgatgcagcgtcggtttcccgccgtgggtgcaaaaacagcgccccgggcgttgtatttgacgccaaattttattataataagaataagagtgcccgcagcacggcgcggcaataggatacaggaggaaccaggatgggtacgttcaatgtttcgcttaaaacgctgaccgaccgcgtcagcatggaagtagtatacaccccccgggagctggatgagatcagtgtggagatcgctgaggtcaaccgcccgggtctgtttctggcgggctactatgattacttcgataagctccgcctgcagatcatgggtctggcagagatgaactttctgtccggtctgacggcagaaaagcgctacgaagcgctggagcagctgttccggcagcagcccccggcggtcatcgtctgccgcagcgaggagctggcgcccttcccggagatgcaggaactggcgcagaagcacgcggttgccctgctgcgttccaacgagacgacctgcaccctgatgggcagcctgatcagcgtgctgaatctggagcttgcgccccgcatcacccggcacggcgtgctggtggaggtgtacggcgagggcatcctgatccttggcgacagcggcatcggcaaaagcgagctggccattgagctggtcaagcgtggccaccgtctggtggcagatgacgccgtggagctgcgcaaggtgtccaaccgtcagatcatgggcactgcaccggaaaatatccgccacttcatcgagctgcgcggcatcggcatcgtcaacgtggcccgcgtgtacggtgtgggtgccgtcaagctgagcgaaagcttggatctggtggtgcagctggaagcgtgggaccccaccaagaactaccagcgcaccggtctggaaagcgaatactacgacattctgggcgttagcatccccagcaccagcatcccggtctctcccggccgtaatctggctgttgtgctggagaccgcagccatcaataaccgccagaagaagatgggctataacgcagccaaggagctgctgatccggctgggactggatgacaaaatggactgaaactctctataaaaaggagcctgaccctatggaacaactcaagcagctgctgaccgcagcaggcattgcttataaagaaaatgagccgctggcggcgcattgtacctttaaaatcggcggcccggcgcggctgttcgtgcagccgacagaccgggcgcagctttgccgcgccgttgccttgtgcaaggcgcagggcgtccggtattatctgctgggcaatggcagtaatatcctgtttgccgatgaaggctacaacggcgcagtgctggatgtttcctccatgcaggacgctgtggaggtgcacggcacacagctcaccgccggggcgggcgtgcggctttcggcactgtgcaaaacggcgctggaacacggcctgaccggactggaatttgcttatggcatccccggcacggtgggcggcgcagtctacatgaacgccggtgcctacggcggtgagatgaaggacgtgctgaccacggtgcagtaccttaccgccgaaggcgaagtgaaagagtcggcggcatcggagcttgacctgcgctaccgccacagcatttttgaggaaaacggcggctgcatcctttcagcgcagtttgccctgaccccgggcgagccggaagccatccgcgctaaaatggacgagcttatggcaaaacggctggacaagcagccgctggataagcccagcgccggcagcactttcaagcgcccggtgggtgcttttgccgctgccctcatcgaccagtgcggtctgcggggctaccggcacggcggtgccgccgtcagcgagaagcactgcggctttgtggtgaaccttggcggcgcgagctgcgctgatgtgctggcactgtgcgaggaagtacgcaccatcgtaaaagaaaagaccggctatgatctggaaaaagagatccgcgtagtgcgctgagctgcgggaatagagggagtggggaacacagatggagctgttgatcgtcagcgggctttccggcgcgggaaagtctgtggctatgaatgcgctggaggatatcggatttttctgcattgataacgtcccggcggggctgctgcccagcattacggcgttttccaaggcgggcgacaaccagttggagcgggtggcgctttccatggatgtgcgcggctgccgcagcagggaacagatcgagactgccctgcagcagctggatgaccagaaaacaccctataagatcctgtttctggatgcaccggacgatgtgctgatgcgccgttacagcgagacccgccgccgccaccccatcagcattgcagaaggcatctccacccgggatgcctttttgaaggagcggcagatcctgcagcccttaaaggaacgtgcaaactataccatcaataccggcctgctctccacctcccagaataaagagcgtatctgcgatctgttcatgaaaaacggcggggcaaaaaatgccatgcggctcaccatcatgtccttcgggttcaagtttggtctgccgccggaagccgaccttgtactggatgtgcgctgcctgcccaaccccttctatgtgccggaactgaagcacaagaccgggctggatcaggaggtggtggattttgtcatgagccaccccgaagcacaggagctgctgcaccggtacgagaactttttgcagtacgccctgccactatacgtcaaggaaggcaaaagccagctgactattgcggtgggctgcacgggcggcaagcaccgctccatcacattcgcacgcaagcttgcggaatactgcaccgctctagggtatgagcccggggtgcagcaccgggatgccgtgcgctgaaaacagaggaactactatgagttttgcatccagtgcgcgggaggagatcgcgcagcgcagtcctaccaaggaatgctgtgtgcgtgcagctgcctatggcattgcctgctttgccaaatactttgatgcccgcggccttgtgctgcaaaccgagcagccccatacggtgcagctggcacagcagctgtttgcccgctgcggcatccggggcgagatattggaaaagccccgcgccagcggtgtgctgtacgagttcaatatccgcgatgcggagcaggtcacccgcctgcacgagctgttcggcaccaccggcagggagaccagtttgcagatcgaccccgggcttatccgctgccagacctgtgtcagcgcctatatcgccatggcttttctgtgcagcggcacggtcaccgacccgcaaaaggaatataatctggaatttcttacctcccggacgaacctcgcccgggattttgaagcgctgctcgccgagcacgagtttgcgccccaccgcacccgccgcaacggcgtgaacctgatctacgttaagaccggtgccaacgtggagcgcttgctccgctttatgggcgctgcggatgccgcaacgcaaattagcgtgctcaaggcgtttaagcaggtgcgcaaccagaccaaccggcagacgaactgcgataccgcaaaccttggcaaaacggcgcgggcaaacgcccagaccttgaaagccatccgctatttgcaggagcagcacgcgctggaaactttgccggaagtattgcagcaggcagcggaaaagcgtctgcaatacccggatctctcgcttaccgcgctgtgcggctgctttgacccggcggtgagcaaatccggcttatcacaccggatgaaaaaactggaggcactggcggaaaatctgcgccagcgccagcaggagggacaggaggcagtacaatgagtgaacccaccgcaaatacccgtccctttgcccacctgcatatccatacggaatacagccttctggacggtgcttgccgcatcgaccagctgatggagcgggtgaaggagtgcggacagaccgccattgcctgcaccgaccacggcgtaatgtacggttgtgtgcagttttataaagccgctaaaaaggcgggcatcaagcccatcatcgggtgtgaagtgtatgttgccacccgcacccgctttgataaggtaaataagatagacggcaataaccacctgatcttattgtgcaaaaacgagaccggctataagaaccttataaaaatggtctctgccggtttcgtggagggcttttactccaaaccccgcgtggataagcagcttttggagcaataccacgagggacttatctgcctttcggcctgtctggcgggcgagatcccgcaggccattctggcaggggactacgagcgcgcaaaggcaacggcgctgtggtaccgggatctgttcggtgcagagaattactacatcgaattgcaggatcacggcttgaaggaggatgccaccgttctgccgcagcttatcaagctttcccgggagacgggcatccccatggcagccaccaacgacgcccattatctgcgcaaagaggacgccaagatgcaaagcatcctgctgtgcatccagaccggtaagaccattcaggatgccgaccgcatggagttccagactgatgaattctacgtcaagaccaccgacgagatgtacgagctgttctccatggtgccggaagcctgcgccaacacggcaaagatcgccgagcagtgcaattttgactttgagttcggtcacaccaagatcccttactacaaagccccggacggcatggacaatcaggcctactttgaaaaactctgctgggacggcttggagcgccgctacggcccggatgtgccgcaggccaacatcgaccgcctgaaatacgagatcggtgtggtcaagaccatggggtataccaactactacctcatcgtgtgggactatatcaattttgcaaaaagtcagggcatcccggtagggccgggacgtggttccggcgcgggcagtattgccgcctactgcgtgggcatcacggatatcgaccccatccgctataatctgatcttcgagcgctttttgaaccccgagcgcgtcagtatgccggattttgacgtggacttctgttacgagcgccgacaggaggtcatcgactatgtcaaccgcaaatacggtgcagaccatgtggcgcagatcgttacctttggtactatggccgcacgcaacgccatccgggacgtgggccgcgtgatgggcatcccgtaccagcaggtggacgtggtagcaaagcttgtgcccatggaactgaagatgaccctgaaacgggcgttggaggtttccagcgagctgaaaaagctctacgataccgacccgcaggtgaccgagctcatcgacaccgctttaaaggtagagggaatgccccggcacgcctccacccacgcggcgggcgtggtcatcacgccggagccgaccgattattatctaccgcttgccaccaacgacggcctgccagtgacccagttcaatatgaccgagatcgaggaactgggtcttttgaagatggactttctgggtctgcgcaccctgaccgtcatccgggacgcagaggttgcggtgcaaaagcagcacccggagttctccatccgaaagctggattatgatgacccggacacctataaaatgctgggtcagggcgataccgagggtgtgttccagctggaatcctccggcatgaagcaggtgcttgtggggttgcagccccagaaccttgaagatgtcatcgctctgatcagtctgtaccgcccgggccccatggactccattcccacctatctgcgcaaccggcacgagccggacaaaatcagctacaagaccccgcagctggcgcacattctggatgtgaccaacggctgcatcgtctatcaggagcaggtcatgcagatcttccgggagctggcgggtttctccttcgggcaggcagataacgttcgccgcgccatgagcaaaaagaagcacgccgtcatggaagccgagcgggaacattttgtgcacggctgcaccgagcccggccacgagtgtccgggctgtgttgccaacggcatcccggagcaggtggcaaaccagatctacgacgagatgtccagctttgcgtcctacgccttcaacaagagccatgcggcctgctacgcttatgtggcattccagacggcttatctcaagtgccattaccccagccagttcatggcagcactgctcaccagcgtgttagataataccgataaggtcattgagtattctggcgagtgcgcccgtttgggcatcaaggtgctgccgccggacgtgaacatctccaacggcggctttaccgcagatgataacggtcagatccgttttggcctgaatgccgtgaaaaatgtgggccgcaacctcatcgagaacgcagttactgagcgcagggaaaagccctataccagcctttacgatttctgcaagcggatgcacggcagcgagctaaaccgccgcgcggtggaaagcctgatcaaagccggtgcctttgactgctttggttccaaccgccacagtatggtggaggcggtagagggcatcctcaagagcatcgagaccgactctcgccgcaatctggagggacagctggatctgttctccgtgatgagcggggaagtgcagcaaggcccgcaggaggacgtctacgagatccgtcccttggcagagtacacccctgccgagctgctgcagcaggaaaaagaggtcagcggcctgtacctgtccggccatccgctggatgcttaccgggaaaagtctgcccgtatcggctcccatactatcaaagccctcaccggcgaggatgcccatgtgcaggacggtgagaaggtacgcattgtgtgtgctgtggtcaaaaaccgcatgatgacaacaaagtccaacagcatgatggcctttaccagtgtggaagatctgaccggcaccatggaggtgatcgtgttccccaaggtgctggacaggttccgggatgctattcaggaaaatgctgttgtggtcatcgatggtcggctttccgtgcgggaagatgaagcctccaagctgctggcagacagcattctgcccattgacagctacgacccgacccgcttggacaaaggccgcccggaccctgtcaaaacagctgcccggcgggtattcatccgtctgccgtcccgcagttgcccccagtacgataaagtggtgaacctgctggagatttttgatggcgatatcccggtgattttgtatctggaagataccaagcagaagctggcagcaccgcgtcggctttacacctccgggcatccgcttttcttcaaagagctggagcggctgctgggcgcagaaaacgttgcaacaaaataacatatttgtgcacgaatggcaccgcatggggcgattttaaatttgatgagttgcataaactgcaaaataacgcgatataacgctattatatcgtgctgcatagatttgcataaagtctcaaaaccctattgaaatttgtctggatggtgtgctataatcattaaaggcgaatcaaagctgttgcaaagcaacaagcctgtttcgggaagaagaggttacaggcaaaagggtaaatgaagaactgaactgtaaattggagggaatctctcgtatggaaaagcaaatcaaaacgattggcgtgcttacaagcggtggtgatgctcccggcatgaacgctgctgtgcgcgctgtggtacgcaccggcctgcataagggcttccgtatgatcggcattcagcgcggctacaatggcctgctgaacggcgagtgctttgaaatgaacctgcgcagcgtttctaacatcatctctgctggcggcaccattttgtatacggcacgctgtctggagttcaagaccaaggaaggtcaggataagggcgctgaaaagtgccgcgagctgggcattgatgcgctggtcgttatcggcggcgacggctcctatcgcggtgcccgcgcactggcacatcgcggcatccccatgatcggcctgcccggcaccattgataacgatatcggctgcaccgattacaccatcggctacgataccgccatgaacaccgcgctggaaatgatcgacaagctgcgcgacaccacccagagccacgaccgctgcagtgtggtcgaggtcatgggccgcaacgccggttacatcgctctgaacgtggccatcgcctccggcgctatggctgtgctgctgcccgagaaggaattcgatatgcagcgcgacattctggataagatcgccgagacccagaagaccggcaagcgtcactttatcatcatcgtggccgagggcgtgggtcatgcacaggagatcgccaacgagatccaggcacgtaccggtatcgattcccgcgcaaccattctgggtcatgtgcagcgcggtggctctcccactctgcgcgaccgcgtgaatgcttccgccatgggctatcaggctgtctgcctgctggagcagggcaagtataaccgcatcgttggcatgaagggcgagaagctggtggactaccccgtggacgaggctttggagatgaccaagagccttgaccccgtgctggtggatgtgtgcaacaccatttccatctgattttaacgttaaatacaagagctatccgtttgggttttctgagcggatggctcttttttgctgtcaatttttcagagatgacgtattacaagcaaaattcaacaactttttgtttacaaatgcttctgaatcagttatactgagaaaaacggaggtgctgccatgaaatacagctggatcgacacagagcttctgcaaaagcctggcgttaccaaagacttacaggcagagtggaactggataagatatcacatcggcggcaaaatgtttgcagccgtctgtctggatgatgccacgggaaagccggtgtatattacctgcaagctagaccccgccgagggcgattttctgcgccgacagtatgaggacatcattccgggctactacatgaacaaggtgcattggaactctgtaaaagcagatggaaacgtgccggatgcactgctgcgggagatgctggaaaaatcttatcggctggtgctgggcggctttagcaaaaagaaacagcgtgaactgttggaaggagaaaagaaagatgccgtttgattataagaaagaatacaaagaattctatctcccgccgaagaagccgcagatcatcaccgtccctgcgatgaattttgtggcggtgcagggcaagggcgaccccaacgacccggcaggggaatacaaggcagcgatggaactgctgtacggcattgcgtttaccattaaaatgagctataagggcagccataagatagacggctatttcgaatatgttgttccgccgctggaagggctgtggcatcagcccggtgcagagggcgtggatttttccaacaaggagacttttatctggacctccatgatccgtctgccggaatttgtcactcgtgccgaatttaactgggcagtgcaggaggccactgccaaaaagaaaaaagacttttctaaggtggaatttttcacctatgatgaaggcctgtgcgtgcagtgtatgcacatcggcccctacgacaccgagccggagactttgcggcagttggatgcgtttgcagcggagcagggatattgcccggatttttcagacacgcgcttccatcacgagatctatctgggcgacccgcgccgcaccgcaccggagaagctgaaaaccgtgctgcgacatccgatccgcaaaatgaaatgacagaaaacttcacaaaaactgtcgctttttattgtaagatgtgctatactaaaattatctgtaaaacacacttaaaaatggaggaaaacatcatgcagcatgaaactgtcatcgtgctggactttggcggacagtacaatcagctgattgcccgccgcgtccgagaaaataatgtctactgcgagatctattcctataaaactgatctttcggtcatcaaggccaagaatcccaagggcatcatcttcaccggcggtcccaacagcgtttatctggaggactctcccaccatcgaccccgagatcttcagctggggcgtgcctgtgctgggcatctgctacggcagccagctgatgatgcacctgctgggcggtcatgtctgccgcgctcccgagcgtgagtacggcaagaccgaggtgtttgtgaacaccgagagcaagctgttcaccgatgtgcagccttctaccatctgctggatgagccacaatgactacatcgagcaggcggctcccggcttccagatcactgcccacaccgcaaactgccctgtggcagccgttgaaaatgccgaaaagggtctgtacgccgtacagttccacccggaggtgctgcacaccgccgagggcaagaagatgctgcgcaacttcgtgtacaacgtctgcggctgctccggcgactggaagatggattcctttgtagagaacaatgtcaaggctctgcgggagcgcatcggcgagggcaaggtgctgtgcgcactgtccggcggcgtggattcctccgtgctggccgctatgctggcaaaggccatcggcaagcagctgacctgcgtgttcgtggaccacggcctgctgcgtaagaacgaaaaggaagaggtctgctctgtctttggcccgggtaatgccaacggcttcgatatcaacttcatctgtgtggatgcccgcgaccgctacttcagcaagctgaagggcgtcaccgagccggagcgcaagcgcaagatcatcggcgaagagttcatccgcgtgttcgaggaagaggccaagaagatcggcaaggtggacttccttgcacagggcaccatctaccctgacgtggtggagagcggtttgggcggcgagtccaccgtcatcaagagtcaccacaacgtgggcggcctgcccgatactgtggacttcaaggaactggtggagcctctgcgcaacctgttcaaggacgaagtccgtcaggccggtcgcgagctgggtctgcccgagtatctggtcagccgtcagccgttccccggccccggtctgggcatccgcatcatcggcgaggtgacccccgagaaggtcaccattgtgcaggacgctgacgccatctggcgcgaagaaatcgccaaggccggtctggataaggagatcagccagtattacgctgcgctgaccaatatgcacagcgttggcgttatgggcgacgagcgcacctacgactacgccgttgcgctgcgcgctgtgaccactactgatttcatgaccgcagaaagctacgatatgccgtgggatgttctgggcactgtcaccagccgcatcgtcaacgaagtcaagcacgtcaaccgcgtgttctacgattgcaccggtaagccgcctgcaacgatcgagctcgaataatggaatatttgaaaaataaacgtatctacgattgaaaaatgagcaaaaatcgacttctgacatcattttgacatcatccgtggcaaaaagcacctgctggatgtgccggaaatggtagcacggtttattatcggagaataatttgaaagccccggaaagtaacgagaaatcgaaactttccggggcttttgcgacatcatgacatcaaaaaacgggctgtgacatcatttattttcggcttagacgagtggcatcaaatcggattcatccttggaggaagaggaagtactgagagtttccagccttgacacgagttcctgctgcttattggggtacagatgggcgtatgtccgcatgacaacaggaacagtatccccgatccgcttggccaccagaacaatagagtacccaagttcgatacagagagaaacgtggctgtgccgaagatcgtggacacgaatgtccggcagataggttatctgggtgcagcgggtcaattctttgttaagggctgtacaggtcatgtaaaatacccggtcatctggggtcaggccgtatagtttagaacagtaggtacgaaattcttctgccagccaatgggggataggcacatttctgttgccgccctttttgctattcttggtgggaccgagaatgtcttgaccctttttccggtgataagttttatagattcgcaactggtcatcatcagtcaggtctttcggcagcagcgccaacatttcaccttcacggcatcctgtccagaatagaatatcaaatgccagaagataggcctcattgcgaaattcttttcgtaaaatctcgtactggtcttttgtgatgataagcatttcaccggcgatagaggaccccatgtagccggctgcatcgcacggattgaattgcagaccgtagaatgtctgggcatagttaaagagggcagtcaactgtgcatgaatggtatagagatacgtttccgcataaggcagaccagtggcttcgcccatctccttgacccgctgttgccagtctcgaatgtccagggctgtgatttcgttcattttccggtttccgagaagcggaacaattttggtgtcaaaaatatttcgcttagtgtccattgtggtgccacggacatgatgctcccggtcgttgaagtataactccacaaagctggcaagtgtcatatcacagcttttggctttctgcagatgaaattcccgctcccactcctgcgcttcgcggcgggttttgaagccgcgcttgcgcttttgcttctgcactccggtgaaatcagtatatcgaaactggcaataccaagttcccgttttttcgtctttatagcagggcatcgaatatacctcctgaagagtttataaatccccgaccatttttataatggtcggggtctttttttattgtggaagaattgccttgaactggtctacgttgtcggaattgctaagcagaaaataaatatttagtccgctgtcagagcggatgcgcagcctgccgtattcgcagacaaggcatttcttgttgttcttatagcgtcggtcgggggaaccatcggcattgacccggagccaagtttctttgaccaccttgctatccgccggtagatgctcctgatccgtgacacagttgacagaatcgacattgaaagagacctccgaaaggtcgtatgcgctgattttgctattgtggagatagaacaccttatccgggaaaatataaatggactctttcttattcagagcggccgaaaaaacaggcacatttgttctgagaaaataggggagtgcaggcattccgagagctttttcttcggatacggttttctcggcaccgccattcttttttgcgctgctgttggtgtgggtttcgggtacatagaaaacggcatcacaggcaaataatttacgccaggcgttataccattcttcgtaggcatcaaactgttcatcggtgaagtcgtattccaaatttacaggagcaatatagtgggcatagagaaatacgatgaatgataaaatggtcaggaaaagccgctgcggtgtatgaagaacgatgaaagcgagcaggccgatagccccaacgataagtgaggctttattgagaaagcaaacccggttgattcgcttcataagcgccttgaagtcggaatctttatagtctgcgcggtcggtagattgaataacttccgtatctgtatatggttcttcttttagagcactttttcgtgcagatttataaatggattcctcggtcgaataactcaatccggttcccgggatggaggcagtttgccggatttttccgttcgctgttttggtgattcgatacccgggaacaccccatgagtatccaacaccgctaccagaaatattgatgcggaacccaccaccaagccgaatgctttttctatacctgaatcccatatcacaccataacctttcctgttattttatcacgagcattggtatatgtttccaaaagctggaaatgcaaagtacagatgtcatactctttcaatggcctatctgtaagccgggaaggagtgatggcacatggcagcatcggatgaacacccgaagcacggagaagtgctggatgaagttctgcgggacgaaatcaaggatttaccccctgaacagatccggcaggtgcttgagtacatcgggcagctgaaggagcagtaacgcatccttcagcatgggcaggctcccttattgggggtctgccttttgttctgcatccagaaatttcaggaagcgaacgtattctataacctttcgcatttcatcatcggtcaggccttgtacactgtccataagttgttgctgcatagcatttttgacgtttgatgcaggggcgtctacctcgccgcgcaggtaggccacggacaccccgtagaggtccgcaatgatagaaaggtctgcatccgttggagttgccttaccgtccttccaaccagcaatcagggaacgacttttcccacataggcgcgctataaaagcgcctgatgtgccatagtgttcggtcagatcgacgatgcgttgtactgtaaccgtcatacgttttaccagctttcttctaagaatcttgtgcacggtgctgaaatctaacaaatgtttgctttgcggtcttgtcctctaacaagtgttggattattatataatcacaatcaaacatttgttagattgcaagagccaatggaggacaggacaatgagaacagtaaaatacagcgaattgagccgggcgatgcatgatttcacaaagcagattgacacgctggatgagtgcatcgaagttggcttggtttcaggcgaaaaggtgcagattagcatttcggccagttgcccggaagcaaacccggagagagtagcagagtttgcaaagcatctgtccgaagttgcagtggcggcaaagaactttaaatacgccggttgtacaattgttcgataagggggattcgattatgacgtatgcagacatcaacaaggtattcacagccgaagtgaacaagtatctggagcgtggctatcacttcaacaccgcaacgatgcgcggcagtcagggcgagatcgcccacattgacctgacggatggcgctgaggtcgttcgtgtcctgcttcggaccttcaccgagggatgggacaagcagggtgtggagctgatcgctggtcgcgttcttgagaaggagcacgtttccccggatgccgatgagaaccacgcagacaccatctggaatgaccggctggagcaaatcagcatccagcggtactacgaagtgaatggttacggcgattacaaaaagttctatggcaccgcagcggatgcagagaccgtcagcaaggtacggatgcgccgctatgcacagcggcctgaccgccagaataaggacatgaccaacgcccaaaccatcaagattgccgttccgttcattcgccggaaactgggcatcaagaacgtggataagagccgcattgaggtgttccgcacgccggattaccggtacatcatcagctatcgcggcactgggtaccagctgaacagaaaggaggactgaaccacaatagcatgaccggaaccaacacgtttgaaacacaggaggattgactatgtattgcaacaagttttttaagaccgaggatgaagcaaaagcgttccagaagtcccacggtggggctctgtacaagaacgtcaagcggagccgcacccgggaatcgtaccgggtggaagccgcaatggctgtgcagggcggctggatgcacggcactgatctggatgcacacccgtactgcgtggcatggaatggcgaaccactgaaagcaagaaaggagaattgagccatgaaagcactgaaaattgagccgggcaaagccccggaacgcattaacgttgccaacgaacttgcaagcctgcagagcctcgtaggcggctatattgaggtgatttacccggatgaacgccgcccggtcggcctgatctgcaatgaggagggcaagtgctgcgggcttgaactgaaccgggcgttgtacaagaacggtaagccctacgacatcattgccggcacgttcttggtagttgggctctcggcagaggacttcgcggatctgcgggaagaagatgcagcctatttcgagaagctgtttcgctcgccggaaaagtttcagcgatttgccgggaggctcgttatctccaaggtggttcctggcggggtgtaaaccccgcctttttcaaaaaccgaaaaaaccgaatgggttttttcggttacgttcgcttttttgggttttgatgggttttgaaaaacacgagcataaaagtgaaattcaaggtcgaaaagtcaaatttgaaggtcaaatatcaaaattgaacgcaaaatagttcttgataaattgattatttttctaaatgtgcatgaaatgtgaaaacccattgggttttttaaaaaccgaaaaaacccatcttcttaagaaaagaagaagaaaaagaataagaagatatgaagactatcgtcttcatcacgcgcgggcgcgcgttataaggctgatgacgaggacgaatccaattgatgaagaacaggatcatcggtgcggccaagcaggtagtcaacggaacagtccagtttgtccgcaagcagcatgagcgtttttccagacggaggatcttctgcattcttccagcgcgtgacagctccagatgagatgccaagctctttggcaagcggatttggctttgttccgcggatttcgcacatccgataaaaacgttcccaaaacaacaaatagaacaccacctttttgtgcaaaagcatgaatctcacaaaaatgagaatattgtattgctatctcacttttgtgagattataatatatctaacaagtgattcattcacctgttagatggaaaggaaacgcaacatggagagatttgtagcacccatggctacatgggaaatcgtgggcggcgacctgccgcctgtccgggttcgtgcccggacgttcgatgaagcacttgcaaaggcaaggcttcgcgatcccggctattgtgccggatgggtcgttgaggagggctgaaccatggaaatcaaaaacgtgcactgcgagaagcaagcgctggagcttttcaggataatgccggacaacaagaagtcatctctccacaatgcgttgagccgaaaccttgagtttaccacttcttggggactggaacttggcgaactccgtgcttatcagaacggtgtttacatcactctccaaggtacgcgctgcagtttttccgtgtatgcagagttggtgaacggaaagcctgttttcaagcgcaagccccctgaaagcaagctcagcctgaaattcagaagcggcctgctgttcgatgctggagacttcaacgaattctaaacaatattggaggactaaaccatgtttgagatcaccgacgccgagaagctgagagacgcttacaccctgctggcattcatccgggacgacgttcccacaaccaccgccgaacagaagtccggcttggccgcctttatggtcaacatcaagaaggagatccgggcctacaacaaccgcccggcacctgacagccgcattgtcgaggagcgcggcattgatggctacattgagctggtgcagctcccgaacgagctggacaaagccagcaaggccgatgcagacgagtggttccggtggaaccgctactacgagttttacccgacggcctatgactgctctgggcagcgcttcacaaactggtacaagctgcaccgccgctgcgggcactggttcgcatatcattcggtcagctttgacgtttaatcaaattgaaggtctgaacgatgaaaaagattgcaaacaagtccattccactttttcagctggaagagagccatttggagagcaagtaccgcagcgagggcttcacgtatatgatcgtcaacggctatgaagtccgctggccgaggtgggagaacttcgtggctgcgcttgaagatcgtacagcggagttctttctccccggtgggacatgggagacactgggcgatgaaagaccggactactaagaccccgcctgatgatggccgccggtatcggccgaaaccattttcgtggcatcacgaagatggtcgcgggaaccaacaccacaaaccaaggaaaggaagattcacatgaagtatgagatctaccagctgaaagaggacaccatggagcaggtaaaactgcggttcatggcatccgatcaggccgcacagctgggcggcatccaccgggagaactaccgccgggtatacggcggtgagattccgtctgtcccggaagtgggcaggatgcttcttcgcctgttcgcactcttcaacgggtcgaatcgacccgttgatttctctggtcacagcatgagcgtgtccgatatcgtgcggctcaccgaggatggtgcatccagctggtggtactgcgacccctacggctggatggaactgaatgaggaagaatgggggcagacctgatgcgtcactacacaaaagcggagtggcgcaagatcccagagtcctacaagggacgttgggaagcatctccgtacaaccttgaacgagtgaagcggggcgaactgccagctgagtacatcggcaaacggacaaccatcgtcaatgacgagcatcgcggtacggtgcttatcaccgagggcgcgcacttcgtcattgatggctgatttcaccaaatcaaacaaacgtccacagagaagcgatttgaaccgcatatcctgccgggcagcaaattccatgcgggagaatagaaaacgcaaaacagagccatcggagcggctctgagtattatttccgttggctcagaatgaactgaaggaaatccgtaaccttttggcgttcttcatctgttaactccatacgctgcacagcggggtcaacggtgcgccccataaggaagtccatggagcagtccaagtagtcagcgatgcgcgccagactgtcggcggcaatcatgcgaccggttcgcaagttggaaagaacgcctttgctcattccgagttcggcgtacatatccttcagctggatattgcgtgcctttgcctgaattttgatgttttccgcaagggcgatagaatcatacaaattttcggttgtcattttgtgtatcctcacaaaatccatcaattgatgctcaaacagcttgaaacgttgcaattgatggattataatacacttgtacagaacaaatgttaagtgaaagggtacagcgcttaccattcagcgcgttcccccagaacctctcagcaaaggggttcattcgtaccacgcaatacgaaccatgaacgttgacctcctaaagacaagcgccgctgcaaagcatagcggacaacagccgcaagttggatgctgtgcagttatagcgccgctcccatgacagcttcgcttaacgacaggggaacgcgttgaatggtgggtactggctctttcattttatcagaaatctaacaagcgttcaatacacttgttagataaatctttgttaggaaggagaaaaagcatgaaaaagactacgatgccggattggtgtgtggctgtcaagaaagccatgatcgaccatgatgacatgaccgtcacggaactggcaaaggaaacgggcttttctcgctcgcatatcagccaagtcgtcaatggtgtgctggtgccgtccgagaacgtccagggcgcaatcgaaaagtgcctgaacatcagcggggtggcttaccggagctaacctacatctcaagtataccagaaaggatggcgtggaaaaatggcgattgaaagccagaatatttacaaaaatgcgcggaaatctgctggttttacgcaggaaaaagcatcgcagcttttgaacgtgtcggttgacagcctgcgggactatgagcagagccagcgtccagtgcccagcgacgtagcgagcgccatgtgtgacgtgtatcaagccccatatctggccgtgcagcatctgcggttgacatcggatctcggcaaacgggttgtgcctgagatccagttgaaagacctgccggaagctgtgctgggcgttctggcggcggttcagcgcttctgtgcaaagcgggaggcaatggtagaaatcgccgcagatggccagatcgctgagagcgagcaagccgaatgggacgaaatcatgtgcttggccaacgacctgaatgtggcaatgaacaatatgcgtttttcgaaaggaggacggcagtcgtgagcaaagagtcgtatttcatcggttgtgcagaggttgcggaactggttggctgtggcaagtcccgggcatataagtacatccagcagatgaatcgggagctgggagcaaggggaaacctcacgtttcccggccgggtgccccggcggtatgcgatggaacgttttggtcttttggaggaggtgcgggaggatgaaagcacaaacgctcgtgccgctggcagcggcggcagcggcgcagcttctggtggtcggaaacatcgccgcggcgttcgctttccagcagaagccgccggctgaaacgctggttacggtaccggtggtggccgagatcgagcaggttgaatgcgttcgtcaggacccggttccgtatgagccggttacatatcaggtgccgctggatgcggaactacagtcctacacggagaaaatgtgcgacctctacgatgtgcccttggaactggcttatgccgtcatgcaggtcgagagcggctttaccccggcggcgcgcagctctaccggggattatggcttgatgcagataaacagcataaacgccgggtggctcaaagatgaacttggcataacggatctgatggatgcccgccagaacattcaggctgggtgctatatgctgggtatgtatctcagcgagtacgagggcaatgtgaattgcgctctgatggcctataaccttggcacagccggagccaaaaaggcttggtctgctggcacatatagcacagcctacacggacaaggtgtggaacgcaatggtagggctgctggaaggagaaagggatgtttcataagatggcgcaaatgattcagacgcacaccgagaggatgctgctggacgaagtttttgcaacatatcgggatgtgcaggatgctgccgccgaaatggcgcaggtgcttccgtgccctcgatgcggaaagcagaccatgaagatgcgcttgcacagcaatgctctttctcgtcaagttccgggcatcacgatttgtgaccgctgcggaaccgaagaagcactggaagatgctgttcaccagccgatggatgttcgcaagtgggcactgatcgaaacctacatgaagggggcaaacctgaaatgaaacgcaaagaaaggcatttgaccgtgacgggctgggtcgttgttggactgctggacacgctggccggcgtaatttccggtgggcttatggccttgtggcagctgcccagtacatatcgctggcgcggctactgggcaatcggtggggagtggattctcattgttggtgtaatcattattgcatcccgcctgatgcacgaactgcagatgcaggcgctttttggaggaaagaagaagaatgacaaggtgcgctcggtgtcacagggtcattacagatccggcggcaatcgaagtggggtacggcgcgaagtgttacgtcaaggagttcggaaaacggctccgagcacccgcaaagccccgcagaatcaggactgccacacagcctaaaatcaccgctgagcgccagattgtagggcagctctcggtgtgggatatactcgccgcacacgaaaaaagcgctgaccagaacggccagcgcgctacaaatggatagagacccacacattccgttggcgcttgatgcaggaacatcaaaccggaaaatgcaggtctccaccacacacaactatattgtagcacaatcggttgattttttcaacaggtacgaagcggcggtcaggagcgttcctactgccgtttttctatacagagaatcaggaggtacacatggaaaaggaaattactaccaccaatcagaccacggcgttggcagatagtctgattgtggtgcagcagcttcctatcatcaaggagcagctgcacagcatcaaagcacaggctcaggagtccgtcaaggaggcgctttcgctggcctgcacggaagaaaccctcaaagttgtcaaggagcgccgggcggcgctgaaccgtgaccgcaaggatctggatgtccggcgcatggccgtgaagaagcagatcatgcagccgtttgaggacttcgacgaggtttacaaagaatgcgttacggacgtgtacggcccggcagatgaagcgctgaagggcaaaatcacggacgtagaagccggactgaaagccgacaaggaaaaaaaggtcaaggattactttgctgagatggtcaaggccagcggcgttgagtgggtcacctatgaggatgtcggcgttgcagtcacgttgaccgcaagcctgaaatccctgaaagccaaggtcaaggagtatgtggaaaaggttgcggctgacgtagcctgcatcaacggcatggaaaatgccccggagatcatggccgagtataaactgtgcggaagtttggctgttgccattaacagcgtgagccagcgcaaagaccgtgtggcccgcgaggaagctgaacggaaacaacgtcttgaagcccagctccgtgcgcaggaagccgagtcggcagtgctggatgcggtggaggaagagctggccgcgccgcaggtcatgggcaccgagcctccggttatggatgagcaggaggtcaaagagacccagcaggagagcaaggaacaggtcatgaccgccaagtttgctttcatgggccgcacattccagtgccgcggtacattgacccagctccgggagctgaagtctttcgtaaatgaaaaaatcgacgaaatccagaagcatatggattccgtcggcattgagaacgaggaggtaagcgataatggctaaagctatgcagccgcagaaattgcacttctctcaggcaatgcagaccgagaaatacaaaaacctcataaataataccctaggcgacccggtacgcgcggcacgattcgctgcaaatatcacttctgctgtggcagttaaccctaccttgcaggagtgcgatgcgggtactattttggcgggtgcccttttgggtgaaagcctgctcttgcagccctccccgcagttgggccagttctacttggtgccgttcaaatccaaagcaaaacgtgaccggcagggtaatgtgattgagccggcgtgtctcaaggcgcaattcgttttgggttacaagggatacatccagttggctctgagaacgggccagtacaagcgcctgaatgtcttggaaatcaaatccggggaactgggcggttgggatccctttgaagagcgtttccatgaaatgcacttcatcgaagattttgaaaagcgtgcagcaatgccgactgtgggctatattgcccactttgagtatatcaatggcttcgagaaaactctgtactggacggcagaccaaatgatgtctcatgcggacaagtactccccggcattcagcgccgccgcatataagaagctgctgaatggtgaaatcccgcaggaagatatgtggaaatattccagcttttggtaccgggattttgacagcatggcaaaaaagactatgctgcgccagctgatttccaaatggggaatcatgactgttgaaatgactaccgcttatgaacgagatggtcgagtgatggttcccaacagtgcggatgacggacttctgccggagacgccggatttcgcagatgccggacagaatggactcggcgagcagaatccgccaaaaatcgagcggacggccaagactatggatttaccggagccggaagcagatgaagtaaaagcggctgttgacttggcggcactctgatggtcaagtacaacattatcagcaccggaagcgacggaaacgccacgattttggaagagtttgttctgatagactgcggcgttccatataaggcgctggagccgtatgtgccgaagctgaagttggtcctactcacccatatccacagcgaccacttccaaaagcgcaccatcaagcggcttgccgaagaacggccaacgctgcgttttgggtgttgccgctggctggcaccgccgcttctggccgcaggagtaccggaacgtcagattgatgtgctggaatcccggacaatgtacggatacggcttgtgcaatgtgattccgtttatgctgactcacaatgtaccgaactgtgggtacaaggtacattttccatctggcaaggtgatctatgccaccgacaccaacaatttgaacggtgtgcaagcgctcggatatgacctctatttgatagaagccaattatcgagacgaggacattcaggccaaaatcgcagagaaaaaggctgctggacagtatgcctacgaactgcaggtgctcagaaatcacctgtcagaagcgaaatgcaatgactttttggcacggaatatgaaagcgaacagcgtttatattccgatgcacgtccatgtggacaaggagaacgcgcatgattgtgacagcgaaaattgagaagctggagaacggaaagctcgtcttgaaacccgacgtagacatcagccggtttgtggcccagaagcgcccccggcgggtagaagtccgtctggatgatgggcgaaccatttccgcagaccagcgccgcaagattttcgctattatccgagatatttctttgtggtcagggcaggagccggaagaacttcggctttatctggaatgggatttctgctcccgctgcctgcgggagtggttctccctctcgaattgcgatatgaccacggcccgagagtttattacatacctgattcagttttgcttccattggggagtgcccacaaaggacagcctgctcacccagacggatgatattggcaagtacctgtatctttgccttgaaaatcgccggtgtgcaatttgcaaccagcctgcagaggtgcaccatgttgaccgcgtgggcatgggtcgagatagagaagctatcgtccatgtcgggctgaacgcgatagcgctttgtcggcggcaccatgaagaggcacaccgcagagaaaaagccctgtttgctgattaccatatctatggcatcaagctggatcggcatctatgtaaagtgctttcgctcaatcaaaaaccgaaaggggaggtggagcgtggcgaatgattacataaaactgtgggtgaaggattacagagcattgctagaaccgttcaatgaagcggaacggggccgaattctatgggctatgatggattacaaggaaactggttcagaaccgaagtttctggggaatgagcgctttgtttgggcagcgataaaagccaaaatcgatgcttccaatgaagcatacgagcgtcaggccgctgccaatagggcaaacggtgccagaggtggcaggcctcgcaaatcaaaagaaaatcaggaaaacccagaaaaccgaatgggttttgaagaatccacaactgaggaaaacccagaaaaatcaaccggcccgcctgatgacaccccggaaagctactgggtctgggctggatgcgacagtatgcttacgccctacatggcagcagaatttcgggatttgcgagaaaccggggtggaagacgctttggtggttgctacgctggaagaagcgatgcgccaccaagcgaagcacccatggtgctatgctaagcgcctgctcgatcaggcagcggcgcagcatgttacaacgtttgcggagtgggaaaaaactcacatcaaaaataaaggaaatcgggttgaccgagaaacgccgagcggaaacaacattctaggtcttactgacagccttggacgaataaagagaagaccgttcaaaaaacaggatgttccgcagggcaaagggggcaattccaatggggagtgatgttcgccatgtccggggtgaagcacagaaggaacttgtaaaaaagtttgaagtgttttcgagcaatggtcggtcacgctggcaggtctggagcgattggatcaccatgagtgctattgcggtgtccaatgcgacagatcagagccactttgacgaacgcgagaagcagtacttatcaatcgcaggaaaatacacgcggccggaaatggaagcatttacggaaatgctggccttgttggtcgtggcactagaggacaacccggaacaggacttccttggcgagttgtatatgtgcttggggcttggaaacgaccatgcaggacaattctttacgccctaccacctgtgtgagttcatgtccgcagtaacgacccccgcagaagagtttcagcagaaaatcggagataggggatgggttgcggtctgtgatccgacctgcggcgctggggccttgctggtggcgttcgcaaacgaatgcagaaagaaaggcatcaattatcagacggatgtgctgtttgtggcgcaggacattgactacatcgtgggtatgatgtgctatctgcaaatgagtctgcttggaatgccgggatatgtcgtcatcggtgatacgcttgcaagcccgtctacgtcttatgacaaaagagggctgcttccggttgacaacgggagcgtctggtacacgccgatgctcaggatcccggtttggcagtatcgaatctttatggcgcagatggagctggtcacccagccgataaaggaagaatatgctgcggatgcgccaaaatccgaaccacagaaagcccttgaagccacaaaaaagagtaagcaaccaaaagatacggaaaagccaaaagccgctaaaatgccgcccaaagagccggagcaggaaccgatgttctctgagggtaagggtgggcagttgagctttttctgataggaggacaatatggattccaccacacacaccacaaccacagtagagttcgtcgattggcggaccaaggcaaaagagaagctggaggcagaggacaagctgttcaaaggcgggcgcgccgccgcgagcgttcagagctatgtgctgcgggcactgctgaactttgcagatcaggagccgcgcttcgctgaggtcgtttgtaacacggagcgcacgttctctgaatgctgcgcggcagtcgtgcacaatgcgggagaggttctgtctgaccttgaagcgtatcgcaaggccgtgcagttctacttccccaatgctgaaatctcgttttcgatgaacatcaatcttaccggaacgccgccgacggaagaagagatgcgggcgccggcaaccattaaaccggagaacgccaccccgaatattccgaaaccgcaggagccggcaaaggagaagcccgaccaaaagaagccgaaaccggagaaaaagcctgcaaagaagaaagaaaagcagagcgaggattcgatgcagctttccttggagggatggttctgatgattttgggattcaagggattcaagccggggctggtcgcaacgcttggaaacggaaaattccagtatgttccgaacgagctgaatgagacgaaaaaggccatgtgcgccagcaccgggttccattattgcttagacccgtgggattgcctgaattggtacacatggaacggcaagaatgagttttgggcagttgcggccgggggcgatgttgacgaggatggctacggaagccggagcagctgtacgaagctggttcctctccgcaagctgacagcagaagaatttttgctgatgcacgccaactatgtgtttgagcatcctgcggagaagtttgaggacagctataaagggccatttcatgtcgcatatggccgggataagaagctggccggagaactgggagaatggctctgcttcatcatccaagatcagcaggagtccatctgcattgcacagccgattgacggcgtgaagattttgccggggaagaactacacggcagagagcttggaggcggcacacaatgaaaaaggctgaagaattgaaactttatgcgccggaaccgaaacggccagagctggatgcggcactgtgtatgtcagttgccgaggggcagggcatgggccgctacatcgagggaaaggtgctgacggtggccgtctgggacaaaaaggaaaagccgctggtcgtgtggcgctttttcggggattactggacgggggagcttcgcgggaacgagaacccgactaaaggcgagctttcgccgcgtcaaattgaggtcaagccctgccagtgcttgacatggaggaccgaagtgccggccacaaaaggagaatcggaactcctgcagaactattttgatgactgcagaccgggatatctgattggcattgtagaagatgcactgtcggctcatgccaggaagaagcgcgaagagcgcaacgcacgacaggcggctgagaccaagaagctctttgagaatctgccggagccgccggaagatctcagtaaacaagttttgaaagtgtgcagtgatgcgggctttctctgggtcaccaatgataaacagaacgtaatcgaacccggcggcgttgagaagaaaatctcgattcagcgggcaaggtgcgatagctgcggtggtgaatatacgctgtcggaactgctcaaacacaagagcacagcgacgtgcaagtgctgcggggagaaaatgcaggttcgcaatacccgctattcggtcaaaaggttatgggccgcaaggacattcctttggagcaagccgcagggggatggagtctggattcgccgctatctggtgtatttcgatttcagaaatcatcgggcagaaccggaatttcacggccgtggaatctggtggacggacggaaagaccatcaagcagtggaaacgcgactggggcgaaaaagctcagtatatcatgtgccagcgcccgaagctgtccgcgatgctgctggccccctctggcccgtatcagccgtacacgctggcatcccacactgaccaatttgagagtgatgttcggaaagtgttgaaatctgaatggatgtaccggtacgataatcacctcaattttccgtgggaagttcggcagtgggaaattgtgaatcggtatccgatggccgaaagccttgtcaaaacgggctgggctgacgctctgtgctctcaggtgtacgacgaatatgagcacagcacccgcatcaatcttcgcgcagaaacctattacggcgtgtttggcttgaaccgtcaggaactggccgcagtctcgcagagcaaaaagtcgttccgcgaggtggataatgcgctggaatggaaagaagccggccttgcaatcaatggcaagaacatggcgatgacggctaacatccgaaaactctcaggaatggccaagacattgcaggaaagaggaatgacgcggagcctgaaatatctccgtcagcagacaaggcgagccaccggaagctacaacggccagattgctcttcaagttgcatcggactggctggactatctcgatatggccggacagatgaagatgaacttgaatcttgaaaaggttcgtttcccgctggatcttaaacgccgccatgatgatttggttctggagcgcaataagcggcgccgaaaggatgcgctaagaggtgctgcaagcagcatcaaaaaggatgccaaggaactggaaaatcaattccatatcgagaacatctacaagaaaatccgcaaaatctacgagtacgatggagcggaatacatcattcgggtaccggatggagcaaaggccattttggaagaaagcagatttcttgaccactgcatccagcgcggaaccagatactttgagcgcattgccaaacgtgagagctacatcttcttcatgcggcgcaaggctgacccgaataccccgtggtataccttggaggtggaaccgggcggcactgtccgccaaaagcgcagctataacaacgaccagtacgccgatttggaggacgcgaaaccgtttattgcggaatggcaacaggtcgtacagggccgcatgacagcggcggaaattgactttgcacggcagtccaaagaaatccgtgcacaggagtttgcagaactcaaggaaaacggaaacattatccgcacgggagcaaatgctggaaagctgctcgtggatgaactgatgcacgacttgatggaggtggaaaaacgtgtcggctaaaattgaactttctctcgcgcccgccaaagcaaaaggtctttcggaagatgagcgtctggatttggggcgcctgctcctgaaagcaggataccgagttgatattgtacgccgtcgtccaaacgccaacccgggcacccagtacgagtactatatgattctggacaagggggatagcaatgcctgatacccgcaaaggacacaaccccagcggtgcgccgggccccacccgggcgcgtgctgaaaatatcatccaaaaggacgagaaacgggtgcatgatcttattcacgttctgcggtatgtggcagatgccgcagggtttgagattgcagagcgcattgtcctgatcgacagtcagtcggggaggatctatcggtgaacagaacaaaaaacgaattggcggattacgcatggaatcctgtaacaggatgtctgaaagactgccgatattgctacgcaaaaaagagcgctttacgctttgccagcgactggagacgaaatcttgcagaacgtccgaaggttcagcaggtcggagcgaacctctttgagctggacactccatgggaaaccacgaataaccgctttctgaacaacccaaccggatttatgcccacgatacataagtatcgcatggattggccacaaaaggtcaaagtgggctcaaccatcatggtatgcacggacggcgacttgtttggtccgtgggtgccggaagattggattcttcaggtattcgctgcggccgaaatggcaccccagcaccagtacattttcttgacgcagtacccggtgagatatcagaatcttgcaaaccatggggtacttccacagaaaaacaatttctggtacggctctaccgcaacgattctgtcagacagcgtgtgggcaaacgaaaagtataatacgttcgtagccatagagccgcttctcggaccgtttgaaggcgatgcaacaaaaacgttccgaaagctgaaatgggcagttattggagcggaaacaggccaaaacgccgaaaaggttattccaaaggctggatggatacaggacattctgacatcggcagatgcagctggtacgccggtgtttatgcggagcaacatggaaagcatagtgggcgctgagaatatgcgccgggaaaagcctgcggcatttttgcagaaaatcccgacagtggaacagaaaaagcggctgtgggaacattgcaccgtttgcggcaagtaccggcctatgaaggaaatgtacgccctgctcctgcgcagaaagcgtggcgataacccggagcgggtggcttatatgtgccctgaatgctatggaaaattcagcatgaagcactttgagaaaggagaaaaggaagatgaagtttgagcgaagcgaacttggagcgctgttttccaagttgcgcacggcggtgccggaggttcgggcggtgggcactgatgatgcaggaatcctgttgagcggctccaatgcatacgccaccaatctggaactgagcgtccgtgctggtctgtccaagccggttgagcaggatgtggtggttccaccgcgcggtgttgattttatcagcggcacggtagcaccggaaatcagcatcgaggccgataaagggatccttaccgtgaaatccggcacggccagggcacgcctgaacacaacgccggcagagaactacccggagttttctggcccgggcaatgatgcaaagcggtgtatcgtgggggccaacgatttaagctgggcaatctccaaagtcctctatgcggtgtcgaaggacgaaaaacaccctgcgcaccgtggcctgtgcttctctcggaaaggcgaggatgtgctggaaatctgtgcgctggatggataccggatggcgattgccagaatcaattgcacagctgatggtgattttcgctttacgcttcctgcggccacggcaaaggcagttgatacgctttctatggatggtagcgtggaaattgtgcgtgaccggaaaaaggctgttttcagtgacagcaatttcgaggtgaagtcccgcctgattgcggaaccgttcctggactatggtaaggttgtggcccagagaaatgaaggaacccgaattgcgcttgacagaaaagaactgctgggcgttctgggtcgcgtcaagctggcccggtctgcagacgcaaaggaaaagagcgttctggtaatggacctggagcccggcggcacaggcagagcatcaatgcgcagcacaatcgcgcaaatgaatgaggagttttcctttagcggaaagttggaagaccccttgcgaatcggcttcaaccttgaatttctgagcgaggctttgaagtcgatggaagaggacgaagtcagcgcgtgggtagttgggccgctgtcccctgtaaagctgattgaaccgcagtatgaagcgctggtgcttcccgttaaggtaaggggtgaagcatgatgcaggatagaacttttcgcgggcagtctgcagatggcgtttggcatgaaggattcctgattcgctccccaggtgtgaaaaacagccgcccgggcgagggctggtacatcaattctgagaaagagccggcatacgcccatctggtcaagccttttacgatcggcatgagcactggcgtaaaggacatggaaggaacgatggtctttgagggcgacatcatcaaaaccaccggctccaacgagcggattttctctgtggagtttggtgagtacattgcctatggcgtgggccatatcgggttctacgcaaagattgccggcaagaactcacgcgactacaacccgtgctgtcttcgggcgttgctctacattggaaaagtggttggaaacatgagcgacacgccatacctgatgaaagaagctggagaggagcagaaaaaatgaaatggactgaaacaattaccccgaaacaggcagctgaagagctgggagtaccttatcacggctggatgagggagatggatcgggcatggatcagcgaagaccagaagtacagcgtgatgtctcgtttgctccgcacggaatggggcaaggtcgaacacgtcacgattacggcggcagagggcgttggccggagtgacggcagcggggatatcccgtgggccgtcaagatggaaattaaaaacgacctgttcggcgagaagcgagttgccgtcgaagtgttcccaacgcaggaccggctggtggacgtctgcgactgctatcacctctgggtgtttgagaaaggtttccagcttccgttcggcatccacccgcgcgataagaaaacggtgacggtcaatcgcggcagtaccagagttcgggccattgacggcgcaggacgcgaacacagcatcaaagagctgctggaagagaatggtgcggcggacgttcctaaacaggcatatgcacaggctatggccgggtatatgatgaaaaatcttctgggagggtgatgcaaaatgtggctttggattgtgctggtggttctggcggtgatggctgcacttctgatttatgcggcgtgctgcgtggatggtgatatagaccgccagagcgaagcgcacccgccgaaaccagagaaaggacgagacgatggcaaagtatgagatgcttatcactgcatccgggaaacgtggctctgcactcctgccgtgcgttgttgtcgatgaaaagggcattaagcgtgctgctgtacgagctaaggcgatggccagagcttgctacccggagtatgaaaaattcaatgtggtgaagatgaaggtgatttcagatgaatgaaaagggattgatggaacagtcgaacgcagcgattaaagcggcgctggagctgtacgcggctgaccatgggaagttgaacgatggtgacagctttacgacaaagctcaataactgtgtgctcaccatttcgctgaaagatgggagcttggacgtacagtttgacccggacgcagacgtcgcggtggacaccccgtacacactggacatgaagctcgacatttatgaggaggaagacaatggatgagtacatcaaccgtgaggacgtattgaaatgcctggagtataacacgattcagaagccgagtgcgaatgatgttgtttctgcgactctccgggtagcgcgggaaaaggtcgagaaacttcctgttgcacaggaaggagcgctactttctttctggcgcgaccccgacaaggatcctccgaaagttgagacggaagtgctgattctgtttgaaacagcctgcggcggatatgggattacgacggcccactacgaagatggcactgttttgtccgaaaaaagcaagttctactgggaagagattttcgagtggggcacctatgatgaagagcatgacgattatctcatccccaaaggctggtgggaatatcgttatttcaacccggaggatgtttacaacaaccgtgttgattctcctgtggttgggtggatgcctttgccgccgaaggaggtagtgaaaaaatgagaacgcttaacgctgaccagctgaaagctgtgctgagcatggaaagttcactgggacatattcacacgctggcagatgtcgaaaacacgattgattatcttgccaaagaagaaccggaagccgtagccggtgtagaaaaattcaacattttcgataccatgtgggcgaggaaaattcaggcggcgtttccgcagtcgttcgtgaatatgcaaaatgagctcattttcagcctgagaagcaattcctgtttcaggctggaagatgtgagcgatgaaacccagctgaaagcaaaaattctggagtggcttacgcgcacagcaattaagggcatttctccgaaggaaagaaaactccactttgagggcatcaacaagctgctgggtacgaattttacgtgggaggaaatggtggacatctacacctatcttggcaacggaatcaagcacgacctctgtgtgaagttcgtggaaagcggctatgatatgacgattattcaaaaagaagggtgagcaaatggataagcaaaagattaagagcgttccgaggctgacgaccgacaacccggtggacaattttcagactgccctcaactttactgacgtcagcgaggacggctgggtatggctgcggcaacctgaaatggcactgaccgagtatgcgcggcagctcgtcaagggccatggcagcagcatcgatttgaactgcaacgatatggaactctccgaaagcctgaccgatcacctcttcgacgacccaaagcagagcatcgatggcctgattgcagagcattacacgattttgtgggcttatgcgaccctgcgggaaaagctcaaatggtacgaggatgcgggcatcccagccattcctgattatggtctgaacaccatccggcgggcaatcaatcggtacggcaccacaccgcaactccagatgacaatcgagaaaatgtcggaactcacgaaggcaatctgcaagcttcagcgggccgtgaccttcaactaccgcaacggtgcgaagatcaaggtcgcccatgagagcgtcagggaagaaatcgcggacgtttacatcatgctggcgcagctcgttgagatcgtcggcaagcctgaagaggtacagcagatcgtgctcgaaaagctcgaacagctcaaaggcgacctggacggcggggaggtgcaaagtgagtaaagctgttttactgagcatccagccaaactggtgcaagatgatctgggcaggaatgaaggaagtcgaggtgcgcaagactcgcccgacactggaaacaccgttcaaggcgtacatctactgcactggtcacgatggctgggttatgaagtcgcccaaggctggcgtgcagaaaatggacagcagagtgatcggcgagtttacctgcgacaaaatcgacaagctcgtccacgtcggaacgatgatggacataaacattttgacatcggacgggtggtataaaccggcagatgcactgcttcaagccgcctgcctgaccgaagaaaccgttaaaaaatatctgcaaggtcgtaatggctacggctggcacatctctgacctgaagatttatgacaagcccagagaccttgatgaattttcaagatttggttttttgggaatgggcagatcaaattgtgtttgcggaaatcggcgttgtgaaaactatgaaccgtcttatcactacatgattccaccgacttgcaaaatcgacggatgttccatttgccgcccgcctcaaagctggtgctatgtggaggatgcagaatgtacgtcatgaacaaaaaatgggactctatcacgaacattgcccagtgcaccagcgtgtatgtgagccccgaacacgaaatcaaggcggttcctacgggcggcggcgcggtatatcgtctgggtcagtacgaaacggcagaaattgcccgcgctgtgctgaatgatctgtatatgcacattccgactggctgcatctaccagatgccgaatgaccaacgagcacgggtgctggtccgcggcatgagcgatgaacggcccgaaaagtttgctgggaacggcaagaagccggtgcgtaggggaggatcctgatggcaaagaaacatcattggggtcgaaaagacaggccgcagagggtatgtaatcctgatacttgccccaattgtatgtacgtcggagagggtgacagctggtgcgacaaaatcggaaaaatcgttctttctgactgggagcctacagagtattacatggggtgctgcaagaaaggaaaagaaaagtgaccgcattagagattttcaaaactattttaaagtggcttcagattatggcggtgagctatgcaactggggtgctcattgcgtctgaaattcctaaaagaaaagcaccactatgtgacaagtgtgcccatctgcgctttaaaagggcaaaaaacgatgtgtgctgcagatatgtctgcaatttttgggatctgccaccctttgacgatcccccagagttttgcaatagatttgaggagaaaaaatgaaagcacacgttgaacctaaaagccgggaatgcccattctgtggtgcaccgacctatgaagtcgtgagcgtcacgggcatgaaatgcgttcggtgcaccaataagaagaactgtggtgcaatcgtcagtttcaacaacaaggactgtgatgaacgcggtgtttcgccggtggtgtacttcaatcggcggacggaaaggaaagtccttcaatcgacgtgcggaaaggaaacgaaaaatgaatctgattcgtgaaattttctttagtccgatggtcgtggatgcggccggaattatcctgattgtggctgcattgcctatggtaggttggtcttgggctgtaagccacatggctggaccgaaggtcaaaaatgcaaaggagggcacatgaaagcacatctggcgttcctgtgcaatggccggtgtcagtggtgcaaaagccgttgggactgcggcaaagcgagaagattcctagcaaaaatttttgggtgcaaagattggagatggcaaaacagatgaagaacattcgccagcagcgggctgatgaacgggataaggcggcgcagatcttcacttggtgtatggtggtggctatgcaccaggaagagggcattggagccacacgcttggagcgggcctgtaatgagatgcacgagtttcagcagcggtataggacaaaaatcctgaccgagaaccgcaagagtgcaacggatgccatgcgggaggacttgaaaggcatctgtgattttgaggtccggcttccgcagaccaaggctccgcgcaaccgcagggaagagcagctccgcatggcccagaacgagggcgcagagatcgcctggctggttatggcggcaacaacgcacctgaccttcggcttcggcaaggaacggcttgcccgcttgaagcgggaaacgctggacaactaccggcaatacatcggatgggtagagcaggacggtgaagcctatgcaatggaactgcttcgccgctgttcggaacaggctttgcaggaagaactcaaaatcaacgatatgcgggaaagcaaagatcatatcctgcccggcggctccgcagaagcccagagggcagatatgctgcgggcaatggaggccgtatcggctaagatggcagcagagcgcggcattacccgccagccgctggccgttttgagccagagtgaaatttcccgccgcatgagcgcaatttgagcaaacaaaaagaggactgcttgcgcaatcccccgagaaaagcaattctattatacctaaattgatggattttggcaacgtagaacaggaggatgcgcaaaatgactatcccggaagatatgatggcgttcatcgaagaaactgcccgcaaagctgcccgcgagggtgcaaaggaagttgtggccgagcaggcccgcaaagccgcaggccggtgtgaccgccggttgcggaacacgaagttgctcctgaagaactaccggatgttcaaaaaacattgcacgggtgcggtctatacggacgaggctggcgaacatgatggtcaggaggaagaaaccgcactggaactgctggacatgatgctccagcggaacaatgccattacggttgaatccatccgcaacagctgccggcgcactaaaatcatgattcgccatatcgatgcaatgcttggcctgtacgaaacctactgcgcccagagcgacaatgaagctctgaagcggggcctgcgcatcatcaaggccatgtacattgacgagaccgccaagcctgtggagcagatcgcgatgcaggaaaacgtgagcgcccggcaggtttaccgcgaccatgatgcagcagtggataaaatctcgatgctgatgtttggtatcgacgcattggaaatgtcttagctcgatgtcaaaaagatgtcatggacgcgtcacggcaaaagtggtacaataataccgtaaaattctaatcatagcgcattgcccgcccggtttcgccaccggacgggtatttttatgcccagaaaggaggaaagataccgccgctccctaatttgttccgcaacgccagcggaaaagcaaagaagggagaaaaaatgaatcagcaagtagtgtatcaggatatttcgcagatccgtccctatgagaacaaccccagaaacaacgaagcggccgttggtccggtagcccagagcatcaaggaatttggattccgggtgcccatcttgattgatggaaaaggcacgatcattgccggacacacccgctatgaggccgcaaaacggctgggcatggacaaagtgccctgcatccgggtcgatgacctgacggacgcgcagatcaaggcataccgcattgcagacaacaaggtggcggaagcatcctcttggaatgatgatgtgctccgcgccgaaatggatgcactgcaggcgctggatgtggatctgagcagcaccggcttcagcgaagtggaacttgatggtctgctccgggatgtggacgattctgattttgaggagtttttcacggagcctgcccaacagccgcccaaagcgaccgatacaggcccggaccccgaaagccagcaatctggacagcctgcaccttttcagcccgctacggcgcaacagagcggctctaagcttatccagtgcccgcactgcggagaatggtttgaaacatgaggctgtgtttggcgggaacattcccgtcagagaaaatcgtgcgggaaaacaggccggagtacgttctggagagctttttctatatcaagccgtggcaggtcgaggaaatgccgaagtggaagatgttcttgctcgacagcggggcattcacgtttatgcacggggtagaggcttcatcaaagccagtggattgggacgggtacctgagcaggtatatcgacttcatcaaccgccacaacgtgcaacacttcttcgagttggacgtagatatcatcgtaggttatgatgcggtaaagcgcatgagaacccgccttgaagccgaaacgggcaagcagagcattcccgtctggcaccgctcccgcggccttgacgagttcaagcgcctgtgcagggactatccctatatcggcatcggcggcttcgcaatcaagcacattcagcccagcgagtacggctacatcaaacggctggtgcagtatgcgaacgcctgcggggtgcgggtgcacggtctgggctacaccaaaaaggacgcggttgactttggcttttatagcgtggatagcaccacatggactacacaggtcaattttggcggcttgtcctacttcaacggctcagaaatggttgtggtcagacccccgaagggcatgataggcgcagactaccggattcgccgagagtatgcgctgaaagagtggatcaaataccagaagtaccttgatacgaaaggaaaatggcgtggataaagatatcgtataccgcgttgaggatggcatggacagagaaaaaattctctgcaccacctaccagatgcggaatttttatatgcagttcagagacggtttcttcaccaatctggacgtaatgaactatatccagcaccttgccgccgcccacatggcgaaaaagggcatgaacgtgctggatgtgtgctgcggccgctctctgatgctcccgctgctgcgctactacgcaaaggatattgcatcctataccggcgtagacatcagcaaagcgaacatcaaagaggctatgcgcggcgcaaccgcaaagaaccttgaacctaaagatctgacttcctactacccgttccgggtgggttggaagctgggcaacgttgctgagatgtcgaaagtcatcccggcggggtttgccgattttgtgatttacacctctgccattgagcatatgcaccctacggacggcgcaaaaagccttgcagaatgctacaaggtgatgaagccgggtgcaaagatgtttctctcctgtccgaacaccccgggcaatgggtatcagacccagtaccgcgctcatgtctatgagtggggctacgatgaactgaaagccaagctggccgaaatcggattcagcattgtgcaggaggttggtctggtcaccagcgtccgggagatggacgagttctattccaagcaggaaccggcactgcgggacttctacacccgcatgaaagcctatgtcccgtctgcattcctcacagcctttatggcgattccgttcccgcgtgaggcaaaagaactgctgttcatcgttcagaagccgaaaggagaagaaaacaatggctaagtttgaaaatcgctacggcgtgcgaaaaatcgtctacaagcagaaatgccggtgcttctgccccatcggaaaggcagactacaccaatgaatttaccgtgaccatggagccggcagagattatcccggactactgcgagatcgacaagttcatccgcgaatgtctggaaggtgaaagcctggtcatcgaggaagcggccagcaagctgaagaaaaagctggttgaggaagtgcaccccagctggatcatggtcgaatccgcggtgaatgacgcaccccacggtaatgtggtcgttatggtatgagggggacagggaacatgaaaaacaccaaagccctctgccaaactgcagttgtcgcggctctgtatgtcgcattaactaccctgaacccgctgtcctggggagctgtgcagttccgcgtggccaatatgctgtgtgcgctcccgttcaaggataaacggtatgccccggcggtgctgttgggaattgcaatcgcaaacgcaacgagtcctttcggcccggtcgatgtgctctttggtctgttggctgaggggactgcatacgcactggtggtctgggggccgtggaaaaagctggggattctgtggaaagcggttattctctccctgtccgtggctctgttcatcggtgtggagctgtctatgatggtcggcgcgccgttctggctgacaagtgctggcctgttcgcgggcacattcctggccgtggaactgggaaacctgatgatctctaaaaccgctctcgcaaaggtcgtgtgagaggggacgcggcgccggctctacaaagggtcggcgctttttcttcggaacaacacaacagcccgggtagataccgggacagaaaatgaagaaggatagtggtggcgatgtagatggaaaagcgagataaggcgttcaccctttataagaaagggatgggatgcaccgaaatcgcaaagaagctggacgtatcgccgaacactgtgaaatcgtggaagaagcgctattgggatgcacaaaagggtgcacccaagaaacgcaccccgccgcaccccaagggtgcatcttccaaatgcacccagaaagccccgcaggatggcaagccaaagccgggtgcaccgcttggtaatgtcaatgcagttggcaaccatggaggcgcgccgccgggtaaccagaatgccttgaaacacggtggctggtctgcggtgatgtttggctctttttcagaggaaaaccaaaaagccattcaggactgcacgaaggatgtggatgcagaagatctgctgatacaggaacttcaactgctgactgcccgggaggcttttctgcttcagcgcatttccgcagtccaggaaaaaaagcagcacatccagtcggtgcacacatccaagtccagccggtcgtttacccgcttggatgaggataaggaaaaagaggcccacgacaaggaggtctacattgagcggatagatgccaaagtcagtcgggaagaaaggctccccggcaccaccgtagaaacatcaaccaccattgaatcaagctaccttatcgtggaacgcttagagcggctattgaccgatgtacagcgccagaagtccaaggtgatacaacagcttgccgacctgcgcagaatgagcaacagcggcaagaacgagttggtagacgattgggttgcggccgttgaagccgcggatgcggaatcggagggcgcagacgatggcgatgaagcaacgtgaagtctttgcccggcgggtgcccttgtaccgcaaaaatccctgcaaattctttgcggaggtgactggctttgcgcctgatccgtggcaaaaagaagccgccacagctattgcacaacaccgcaaggtttcaattcgctcaggacagggcgttggcaagactgcttttgaagcgaacctagtcctttggtttctttcttgcttcccgtatccacgcgtggtgtgcacggcaccgacccgccagcagctgaacgatgtcctctgggccgagattgccaagtggcaggaacgcagccctgtcttgcaggctatgcttgtttggacaaagacccgcgtttacatgaaagggcatgagaaacgctggtttgccgtagcccgcacagccaccaagccggagaatatgcagggcttccacgaagacaatatgcttttcgtggtggacgaggcatccggcgttgctgaccccatcatggaggctatacagggtacgctttccggcgataacaaccgcctgctgatgtgcggaaacccaacgcagaacaccggcacatttcacgattcgcacaccgtggatgcccagtcctactactgcatgaaggtgtccagccgggacagcccccgtaccaacaaacaaaacattgcagatctggaacggaagttcggaaagaacagcaatgttgttcgtgtccgtgtggatggcgagttcccggagaatgaagacgatgtctttattccgatggcgctcgccacaagggctgtcaatgctgaaccgctggagcacaatgttccggcccgaatctccattgggtgtgacgtggcccgcttcggcaacgatgatacggccattgcacagaacattgatggagatatccaaaagctggtcacacgccacggtcaagacctgtacgctacggcagatgatatcattgcgatatataaagccctgcgtgcagcgtatccgcagtaccgcggcctgatttatgcggtcattgatgacaccggcgttggcggcggcgtgaccgacattctcaaccgagaaaagattcggcagaagctaaccaagctgatggtcgtgccggtgaacttctccagcgccgtgccggacaaggaagccgccgggcgctatgcagatatcgcaacgtggatgtgggcagtcctacgggatatggccacggcaggcaccctacatatcccgaacgattcaaccctgataggacaacttaccacccgtaaatacatcttcgcgggcacaccactgaagctgaaacttgaaggcaaggatgccttgaagaagcgcggcctgaccagtcctgaccgcgctgatgcggtagctcttgcgctgtatgagggcggcatctttgatgtgcgcagtctgatatgatagccggaaaggagaaaaggtgaaaaaagttattgccggtaaaatcaaaccacaacttcgcctcgatggctattacaacgtcctgaacaagtatggcacccagcacgatagcaccgagtattaccagtgggcaactggtgctgctgtgacagacgcggaactggccgacctttatgcaggaaatggtctgttttcgaccatcattgatgccccagcggatgatgccaccaagaatggcattgacctgggtatcaaggataaagacctgcaaaagcggctggatgaccacctgcagaccattcactaccaaagcaaacttgcaaaggcgctgaaatgggcgcgtctgttcggtggctccgctgttgttatgctggtagacgatggcagacttcttcaggatccgctgaactggcgggatgttcacggcgtggcagaattgctggtttacggccgcaacgaggtgttcccgctgtggatcaacggctatgagaacaaccctgacgatgaaaactaccgcaaaggcggtacgggcatcccggagttttaccaggtgaacagcgtgtacggcagttatgtggtgcattcttcccgctgcctgatattccataacggggagatccccgaaggctccacgatggccaacctctaccgtacatggggcattccggagtatatgcgcatccgtgaagaactgcggaatgccagtatcggcccgggctactccattcgactgctggaacggctgtcgatggtaacatacaaaatgaagaaccttgccaacgttctgtctacggcagacggtgacgatacggtgcttcagcgtatggaaatgcttgaccttgcccgcaatctgctgaacatggtctttattgatgcagatggcgaggatgtgggcattcaatccctgtctgtggctggtgttaaggacattctggacaatgcctgcgcaatgctgtctgctgtgagccatatcccgcagactaggctctttggccgttccccagcgggtgaaaatgccaccggcgaaggggacatggagaactataaggaagccgtgtccggcatccagtctggcgacctccgggacaacacccgcacgctggtcgaactgattctgcgcggaatggtgtggaacggcgaaatcaaagaggtgccggagtacactatcacctacaagagcgcatggagcctgtctgatgatgaaaaggctacgcaggaccaggcgaatgccgcggcccagcttaccagagcacagactgtatctacatacgttacggctggtattttggaaattcccgaggttcgccagtccttggcgcaggatgaacagtttgaccctgaaaacatcatcacggaagcagatgttaatcaggactggggcttgggcgaggctgacgttccccagccgaccaatctgcagaacccgcctgcggcaggcaacctggttacggatgaaggtgactgcggttacgttgccggcttcgttctgaatgatggaaaaatcctctgcggccaacgctccgatgggcaaggctggtgcggccccggcggtcacatcgaacccggggaaacgccgagcgtggcattccgccgggaagcaaaggaagagttcaatattgacgtgggagatattacctatctcggcaactgcaagggcaagccggatgaggtgcttcccgttcagatctatctcgtcaatggcttcgatggcgttcctcggtgtgaccaaaaggagatgttcacggctacatggatgccccctgaacagattttgaaacaggatgtgcccggtggacttgtgtttgaaccgtttctcagaagcgtgaaagaataccttgaccggctgggcattacactggatgattttgacgagagcaagcacaaccgcgatgaggatggaaggttctccagttctggcggctctacatcatcaaaagatgtatcgagcgaggaaaattcatcaaaagacttgaatgattctcaaagtcatgctaaaataaattctaacgcagtttcggcaaaaggcgcgaacactttcaaggtgaaaggtttccccaacaagcagaagctgaacaaccactggcagaatggaagaactcacgctgctgagtacgctcccgatggcattacgacaaaggagcagtacgaaaagcgggcggttcaacttttggaaagcccgtgcggaaacggcataaaaggctacaagacaaaagatggccttgtgtgccggtatgacgcgaagaaaaatgactttgcaaaaggttccccagagaagggcgtaagaacgatgttcaagcctgacgatggggaagattactataaacgtcagcttgaactggaaggaatcgaagatgactgagaaaatcctctgcccggtatgtgggcagcatagctttgatgaagacaacgattttgaggaatgccctgtgtgcggctgggtaaatgatggcgtgcagagagcggatcctgattatcgcggcggttataaccgcatcagcctgaacgaagctaaaaagaagtttgccgaaggcaaaaaggtgtttgactaaaatattggcgttgagagcctttgcaggtgacgtgaaagcgtccctcgcaaaggctctttttgtttgcagtcatagctcagttggtagagcgcctgccctccaagcaggatgccgcgggttcaagccccgttgactgctccatatcgagggttggccaagttggataaggcatgggcctttgactcccagaccgccggttcgagcccggtaccctcggcttttacgctggtgtagctcaataggacagagcaggcgatttgtaaccgtcaggctgtgggttcaatccccacctccagcaccacccgccgtacaccgtaatcggcacctcgatggcatgagggagcaccgaccctgctcccaacagaccgctgcgaagcgttccggcctgttccatgacagagccggcgcggagccataaaccgcgttccttccgcttcgcacttggacggatgcgcgctgtaagcaaaaggtcaaaaattcaagcgctgcatgccataagaacaaagaccctgcatcaaggtggagatgcagggtctttttgatgtctgcaaagggaaaatggttcccggaaagataaagaggtggatatgcctgtgaagaataatgggcccggcatgaccgggcgctcttcaatgatgaaaaaatcaaagatcgagccggagtatccgcagtgggcagaaagcaagatgcgcgcaatcgaaaatcggcggttgaaagaactgcagaagattgtgcgagaatccatgcctgaaattctggctatcgttgcggaagaacagaaaaccggctccgacagcatcagacatgatggatacagcgacatggttcgccgcatccagaacaggttccgcattatgcgtgaccggctcagtcggcggctgaaaaccgatccgttggaacgggatgttcgccggtgcgctgactacaccgaccggcggcaactcaaagaatggcagcgcagcgtgcgcgccacgctgggagtggatatccatgacgacttctttctcggcgaaagatacgacctgatgcttaaaagatgggttgagcaaaatgtcagcttcattaccagcattgaaagcgactgcttcgatgatatggagaacgtcattattgagggttttgcaaaaggccgcaccccggcggcgatttccaatgaaattcaacgccggtttgatgtgaccaagtcgaaagccaatcttcttgcgcgtgaccaggtgggcaccctgagcgcgaatctgacccgcacaaggcaggaatccgctggggtagaggaatatatctggagttcatcaggtgatgaacgtgtgcgcgaatgccaccgtgaacttgatggccagaaattccgttatgacgatccgccggccatgtggtacatgacaaagcacggcaaagtgtatagcgggcggcattgcaatcccggagaggactaccagtgccgctgtgttgcaaaacctgtctttaacttcgataggctgaattctgcagcctttaaggagaagaaacaatgaaacagaatccgccgctagtccttcggagcgaaatgcggacagacagtgtgcctgtcgatgagcattacagcaccgagggatatttttatgataaccccatcctgacccgcacgggcatcttcaagtacacgctggaagatggctcggagcgtcgagaattgcgcaggccggaagatgtgtttgccccggaaagccttgcaagctatgagggaaaacccatcatcataacccacgatgcgcaggtaatcgacaaggacaatgcccgccgggagagagtgggaacaatcctgacccctggacagcaggacggagaaaccgttcgtgcaaaaatcgtcattgacgacccggatgcggtaaaggcatccggtctgcgggaactgtctgttgggtattatcaggaccttatcatggaacccggagaatggaacggagagccgtatgatgcaatccagacccatatccgtgtcaatcatctggcactggttgctgtcgcccgtgccggtgatgatgcccgcctgaatatggacagccaagataacaatggaggtatgacccctatggatgagaacgaaaagatgaacaaccccactcaggacgatgataccaccgtgggcactacgaagcctaccactgatgatggcgaggatgcgggcggtccccctgcggctcccggccttgaccccgttggcattcaggcagcaatcaaggcgtacatggcggcaacagccggcggcgctactgctgacgatgaaaatgacccggcagcaggcggtgagcctgcaaagcccaccaaggatgatggcgaggatgatcctacaaagcccgatgcgctggcagagattactgcccgccgtgatgccatggaggacggtcaggctaaagcggacattaacgccctgttgtccatgctggatgccgcaaatgcccgcgctgacgccgcagaggacgataccaagcccactgaggacgaggacgacaacccggatgattccagcaaccagctgaaccatgacagtgccaacgccattgcagcacaggtcagccagcgcgtggaactgtgtcgcctgggcgataagctgcatctggatggcatggaaaccctgtcggtgatgcaggcaaagaaaaaggtcgtgcacgccgttatcccgggtatgcgtctggatggtaagagcgcagcctatatcaatgcggcgtttgatattgcaaagggcaaggtcaacggccgtaagactgtggcagaccagcgccgtcaggtgttcaatgcggattccgcaaatgcggctgttcgcaatgctggcaagaagaatgatcccactgcggcccgcaaccgcatgattcagcgtcacgctgccgaaaaggaggactaagttatgaacatggctgtacagatgaactacggcgagccgagccgtggcatgcctggtctgctctatgaccgcgcaaactatgaagctgtcacccgccggaacggtgcagaggatggcaagctgttcttcggctgcggcgttgtgcagggcaccgagccgggcaaggatattgccctgccggctaccggcgcaactgccgataagtttgaaggcgttgtgatgtacagcgccaataccgaaatggacgatgatggtgccgtgctcctgcgcaagggccagatcctggacgtttgccagtccggcaagctgtgggtgcagctggttgattctgtggaacccgcctatggccagccggtgtatctggtgattaccggtgatgatgccggcaagttcactccgaccaagggcaccaacctggccgttaaggcccgcttcatcggtgcggcacagaacggcatcgcacccgcccagttcgtagaacagctctaaggaggtataacctatggctaagtttaatcccttcgatcccgccaatggctacagcgaggaggaccgtgttgccctgtccggcaaatgctcttcgcttatcaatcaggcatataagaatccgttccctggcgcagcgctccgtctggatgctgctgacaatgcaggcatcttctttgccaagcagctggcacacgttaagaccaaggcgtatgacaaggagtttccggagctgtccggcctgaaaatcttcccgcagaccagcgataccgatgagggcgcagcctacatcgagtactactcctatgagcctgtgggctttgccgatattatcgccaactatgcttcggacctgccccgtgttgatgtgaagggcactccccatcgtgctgaaatcgtcaacatcggcgacagctacggctacaatgtgcaggaactgcgcgcatgccgccgcaatgcggttctgggcatcatgaagtctctggactctgcccgtgctgaagctgcccgccgcgtgtatgacgtgaaggttaatcacctgatctggaacggcgatgcaaagaccggcatcatcggcgtgctgtcctccgacaacaatatccccatctacacccttcagaatggtgccagcggcaaggctgactgggcaagtaaaacggctgatgaaatcgccgcagacattgccggcattctgaactacattgacaccctgacccagagtgtggagcacccggattcctgggtcatgcccaatgacctctacaccagcctgaacctgcgccgcattgatggcaccggtgaatctgtgttgtcctacatcaaggaccatactctccagattaccaactgggaggttgctggcgaactgtccaagggcaatacggactacaacaccacgggtaagaacatcggcctgctgtacaccaaggacgctgaaaagatgtaccatgatgtgcctatggcattcctgcagcacgcgccgcaggatcgtaatctggaaattgtcatcaactgcgaagggcgcgatgcaggcatggctattccttatcctctgtctgcctgcctggtctatggcctgtaagaaaggagcaacatcatgaagatcaaaaacatttctgtaaagcctatctgcatcggcgatgcatccctgctgccgggcgatactgcagaagtcggtgacacctttgctgacgctgttggcttttacatcagcatgggactgatgcaggaagtgcaggagaagaagacacgcgtcaaggccaaggctgggcaggagcccgattccgatgctccggcagaggctgaatcctgatggatgcacctgatatcgccgccattaccaaaattgtaaagatggtgggcaccgagtttaaagccatgccggatgaagatatttcgttctggattggcctgcaagcaccggttatttcgcagaaaaaattcggagcggactataacctggccgtggcgcttctggtgtgtcatgctatgaaaatggcaggcaatggcgacagttctcttggaaccattgcaaacaccgggcgacttgccagcgtatctgaaggtggcgtaagcatttcctttgctaccagcaccgccgggactaccggggatgctgagtaccagcttacttcctacggcttgcagtttatttcgattcggaaccggcacatcgtgcctatcatgattcgataaggagaccgtcccatggcggtagttggagacatcggacttgacctgacaccagagggcagagcggcgatggagcgcctgaacgaactggccgatgtgactatagaggtagggtatcaggcagaccaagaggcggctgacgatgaaacatcactggccgaggttgcctactggaaccactacggaaccctccacaaagacggttctgtgatgattccggcccgtccttttatggacaccatcaaaaagcactcggatgaactgtcagagttttcgcagcaggccctgtcctcattggaaacagctgatgcagttgccaatgcgataggttcgcaggcaaagtccatgattcaggatgcaatcaaggatgaggaatgggcacccaatgcgcccattaccatcgagggcggctggatgatgaatgaatatggtaagaaaggcccggtgcctgtgcatattgaaggcaaaagttccacgaagcccctgattgatacgggcactttgcgtcagaactgccagtacgttatcacgaaaggaaagaaatgaacatctttaagcagatgtacactgtgcgccgatataagggcaccagctgggacagcggcacggccgaaacaacttactcggatatgcagcttccgctcgatgtacaggccaaaacgcgccgcaatcaggacgatgcttccggtcgttccacgaacggcgttctgaccgtgtatagcgatgtccagctttttcctacggaaccggataaacagacaacgggagatcgtctgctttacatggggcagtggtacgcctgcaaatcgtccatctactgggggaataccattctgaagcactggatctcggagtttgaagccgttgacggggagaaggaggaaagcatcaatgacaccagctgagtgccgcgaagcggttcggacgatgtttgcagatttgtatccaatctgcaaggtcatttacagctatccgaacgcggtgcgcccgccgctgccgtatattgtcctcgactttgagagcatcgacacggttggcgcatttgaaactatcgaagatggaatccttcaacagcaaaaatgcaagcgcatcccgttttcggcagaactggtcgcggaaagcaaaacgacccacgccgcaggcgtaaaaaaggtggggctctcaactgcggttgatgacctcgaccaagctgtgcagtttttcgacagccagtatgcgtgcgacaagatgcgcgccataaacataacggtgagcgccgaagggattcctgaagtgattcataacagcgcgcccggcgtggaaagggcgcgctgttctttttctgtgaactttgtgcagggcacaaaagagtatgcagcgttggccccgaccatcggaggatacgaagcagaccacaatagcgcggcggcgaaagccattgccgatgcagaggccggctggttcgataaggttgaggtcgaaaagaaaatcgaaaatgaataaaggagtgatagcaacgtgaacattgacaaaatcgttgaggtcaacatccagatttccgaggcgatgtccatcgatggcggctacgataccatccttattatgggcccgctgcctaaagcacccggcgggcgcacaacaccggatgttgccggctatgccaatctgcaggatctgaaaagcgcaggtttcgcctcggacgaccctgtatatatcgcggcaagcaaggtgttcggccagtctccgaagcccacagcggttatgatcgccgtgcagaagctgtctagcggttccaccgagaaggtggacgttacccttgaccgtgccattaggatgccgggatggtactgcatttgtccagcgggcatcaaggaagatttctaccagtccattgccgactggactgaagcaaacgaaaagctgtgcatctgcgaaacgaccggcatctcggcatcgcccgtttctgatgcaatgcttcgcactgcggtcattcatgcaacggcagagaatgactgcgtgaactgcgcttatgccgcccggttcctttctttcgacccgggtagtgaacagtggtgcttcaagtccctgtctacgatttctgcgcaggctttgtccacaacagacatcgcaagccttgaagcaaaaaatatttcgtactacaccactgttggcagtaaggccatggtgcagggcggcaaggtgagcggcggcgaatggattgacactatccgcttccgtgactggctgaaaaccgagattcagtccaaggtgatgaacctgttcctgggcctgcccaaggtgccgtttacggatcagggcattgcactggtgcagaacgcagtcattgacgcgctggaagaaggtgtccgcgctggtggcatcgttcaggatgcatcttcggaagatggagaagcagaacagtcctacaccgtcaccgtgccccgcgcggccgatttggatgctgccacccgtaagagccgcaagcttaccggcgtgacatggacagcaaatctggctggtgccctgattgctgcaaaaatcagcggtacgctgaattattgagaaaggagaacagctagatgcgcggagatgttaccgtttattccccaaagaacatcatctgttctatgggaacgcatatcccctccggctttgccgaagattcctttatcaccattaccccgcagggcgatggcgtgaccgacgaagtcggtgcagatggagaggtagttatctctatccctgacgatccccgctttgaggtgaagctggttcttcagtatggctccaagacgaaccagtggcttctgaagcagtacaacaacaataagcagaccccgggcaacggacttttcaatatgcaggtcaaggatctgggggctaacccggatttcacggcatccaaggcatgggtttccaagcctgccccgtgcgcttacggtaagaccggccagagtcaggagtggacgctgcgggctgttggcaagatggagccgaagaactgaaaggaggaaacctgatatgaaaatgaaacgcatggaaatgcgcgacattacggttggtgaataccagtttaagattcgcccattcggcgccaaggatgccacctacatttttggcgatgtcgcatccatcattcttcccattctgggcaccgtttcggttgcaagcaacgacaaggatgccattcacatggaaatgtttgaagggatggacatggacaaagattcgctggtcaaggcacttggccgcattgatggcagaacattgagcaagctggtaaatgagctgctgctgagccacagcaatgtgcgcgttctgaatccagaaaatggggtttatgaagtcatgaacgaagatgcttatgacgaaatcttctgtcagtaccttgctggcatgcttaccctttgtgctgaagttgttcgcctgaacttcagcggttttttcagcgatgcgagcaccctctttggacgccttttcaaagtgcgccatgcgggcagctcgaacagtacggagagttcgacaacgacagagtaacaagccttgaatggattatgtataccctgattcgcgagcgagtggcttcgatgtacgaactgacctatgtttataatctggatgaaatgctaaaactttacgacctgattatgatgcagcgggacattgagtacgccaaaagccaagaggacagaaggggggatacataagtggcggcaaaggaaactgtaatcggaaagttcgtcaatcaaattctgttcaaggtcgataaaagttctgttgatgacgcaaaaagcgctatcagcgaagtaaaaggctttgcggctaaagcacttggcgcaatcggcatctgcttttcctttactaagcttgctagtcttgcagaggaatttggcagtatcaacgataccatccgcggggcaacccgcgagatgggagaccaagcggatatccagcagaagattctgcaaggggcccaggattgccgtgaagaatacggggtcatggccggagatgtgacaaagctggtgcagttgaacagtaaactgttcccggttgatgatgctgtgaagtttgtttcgcttgtcgaaaagctggaaaaaggctccggcagagaagcaaatcttgacaacaccatgagtgtactgcaaaaggctatgtcttcgggtaagctggacaaatctggcttttctaacttaaaaacagctgccccggaggttgtgaaagctatttcgtctgcaatgggagtgtccgaaaagcaactccaaaatctggccgagagcggaaaactttccgcaaagcaactgaaagaagcgttctttgcggcagaaagcgacattcaaaagaactttgatgaacttggcttcggcatcggggacgctcttacttatgtcagaaatcagtgggggctttggcttgcaggcgcagatgacatgcttagcatcacaaccagtattggcaaagcaataaaaaccataagcgatttcctgatgggaaaggcacagcggctgacttcgtggctgaaaaatattgccgagaaacttggcggcgtagaacagctgctgaagctgatcgtgatggtcgccacagctctgttccttgcaaccaacggaagcaagattttgtctttcttagcgggcgcagtgaaactcctgcaaggatttaatctgcaaactgcccttgcggccgcaaaatggctcttgctgttccttgtgctggaagatgtttttacattcctgcagggcggcgatagcgtctttgggcggctcctgagcgaggctggtgttgatgttgacgcattgagagagaaaatcagtgcgttcttcgagggagcaaagcagtttggccgagacgctcttgattcgctgggacggttctgggaggagcacaagggctcgattttagttgttctgcaagccctttggcaaggactggttgacctgaccgcagacatcatcacattgggagggcacctgttcgacctcctggctggcttaattaccggctttcagaccggagattggacgcaattcctgacaggctgtaaggaactgtggcaagatttcctcgatattctgaatggtttaggacgcgctgcttttggcgaaacatggaaaccactgaaagaaagcgcacaggcaatctgggattggctgaaaggattctttgactggttcggcgataaaatcacctgggctaagaacctgtggaacggcgtaaaaaatttctttaccggtggaaatggtgatgatcccgatgattctgatgaagggaacggttctgataagaatccgtctggtcctagaggcgtgggaggcggaaagtcctctggtggcagcggccgcacaagcaatgggaaatcaccgacaggggcgcaggcttcttctgggggcgctgccgcaagcagaaatgctgccagtgcgtttatttcggggggaaggccggtatctataacaacggcatcgcagcggccaatcgcgcaaactactaacaccaaaaacatcactgtaaaacaggaaaaccgacaaagctatacgttccaagtgtctgatcgcgatgccgcatccaagctgcagtctaccgtgagttcgcagtcctcgcaatccacaaaggatctggcacatgcgcttaattacgggaggtgatgcctgatggaagcgacacagcccgctcgacttggagattttgagtttgacgctatcatcaaacgcccggaaacattgtccagcaagattcctgactacgcaacggaagaaggatatagcgccagtgaccacatctgtctggaagcggtaacgctcgatgtcacggcggtaatctccaacgcgccgattacatgggcagaccgacacccggcatcatcgagccgggtgcaaagcgcagtagaagaactgcgtcagctgtgggaaaaaagaacgccaatgacctttacggccggaggcgatagctatgagaacgtctgcatcgaaagtgtgacgttccccaaagaggaaagcaacagcgagcgtattgaactgaagttgaagcaggtgtctatcaattcgacagaaactgccaatatcagcataaagtatgctcgcggaggaacgtctaaaaagaatactggcgcgagccagaagagcacctccacagcaaaatcttccgatagcggaaaatcttcttcccgcagcagcattctttgttctggggcaaaagccattggattgtttaagtgaggtatagatgatggatttggaatactatgagatctctgtaccagaccgaaacgattccattatgcgcgtgaaccttgacgaagtatattacaatcttcggctgacatggaacgcatacggcggtttttggatgctcagcatctatgatgcagaaatgaatattatcctcggcatggcgcggctcgtgccgggggcaatttggaatttctactatcaaacccaaggaggtccgccgggtgtccttggcgttgaaacggagcaggaaataatcggccgcaatgattttgtggacggaaaggcaaaactgctataccttcccgcaaaacagcttggagtgtaacagatggacatctgggatagacagtaccgagtaagaatcgggaaaaataattctgtcggtcgtgaaatcggaaagcccaacgaaaaaacgaagagggctatccgatgttccttttcctgtgaaattggtgatagttcaagttctaatacggggaaaatcacactttggaatctggcagatgaaaccttgcgccttttggagcaggaagattgcctgattgagctgcgcgctggatatggtgatgacctgcccgttattatgggcggttctttgacgtgctttgaaacggaaacaaacggagcggaccggcagaccacaattgagtttgtggacagctttacatccgcacgagatacaacggtgagcctgagttattcgggcgttgtgaacggagaaaaaatcgtcagggatgttgcccaggaaatgggatgtgaagtcaaactttctcccaaggccaaaatgatcgactttaagaattttgcttttgttggcacaggaaagacgcttatcgggcggctgtgcgatagaagcaaacttcgctggagtgttcagaatggtattattcagatatgcgcactggatgaaccgctaacgatggcggcttatgtcctttcggccgattccggcatgattggttcaccgaagcctttctttgaatccgcatcgaccagcagcaaatcttcaacgagtaagaacgcgagttccaatacgaccaaaagaaaggccaagaaaggcattgaggttacgtattgcctgaatggccatattcagattgacgattatgtgaaagtagaatcccgagaggataagggaaactaccgggcgtcaaaaatcaggttcattggcgatacggagggcgacgattggcaatgcgttgggcaatttgtggaggtgaaatagcgtggatcaggacttccgcgatgcagtcgtgagcatcatcgaccagtacatgagggataatatccacacctcggcacctgctaaggttggtaacgtgtccgaaaatttcactgctgaactaacgccggatttgaaagtaacgaccgatgatgatagggaagtaccctaccctaaaatttcgggcacggtcatcctgatgcctactggagccggtggcacaatcgggtttgcctttcccgtgcattctggagatggctgcgttgccattttcggagagggtggctccggaacagatctgaagtgggatttatccaatgcgaccttgttgccgggcttgcctgcatcgtccagtgagcaggtcaagcgtgccggcagtgaggatgcagcggtcatgtttgcaccgaccgcgaccatcaccgtcaagaaagacagcatcgaactgaaaaagcaagacacaaccataaccttgaaagacagttccgtctttgttcaaagaggcggttctaacatcgaggtgacggatggcagtaccaaaatcaccactccgttgcttgatgttaccggcaatacggaaatcaaaggcaacattcaggtgcaaggaaacgtgaacatttctggcacgctggtacttggtggcatcgtaatgaatacgcatacccatgctggcgtacacggaaagacaggaggcccgcagtaatggctttaaaagaccttgcgcttgctactgatggagatttacttatcaacgacgcaggcgattttgaaattatcgatgcagtcaagcagggggttcaaatccgcctgcggtggattaagggcgaatgggtgttcaataccgctatgggcacgccttactttgaaacaatccttgtgaaggttccgaatcgagccttgatcgagaaggccctgcgggatcaaatccttgccgttgatggcgtaacaggggtgggcaccatcaaccttataaaggatgcaaagaccagaacgctccgagcgtcttttaccgcgaccaccaccgaaggagaaatagaaagcgaggtggaactgtcccatgtcggactacggagtgacggataagggctttcagatgcgccgactggatgaaatttacgccgacatctgcaaaaggtttaaagacgaggttggagttgacccatcggagaacccacaaagcgtgatgaacgtcctgtttacaatttttgcggatgccccggcggaactctgggaggcttatgctgctgcatatcagcagcttttccctaatacagcctgcggtgttgcgttagataacgtgatgcaggtgggcggggtgagccgcattggacaggccaaaactaagtattttatctcttgtactggccaagagggaacagtcattccggttggtgctttgattcagtcgagcagccgaccgcaacgtacttttcgggcggtcagcgcatccataatctccagcgcaaactggagaaagctggcgattcgtccgattgaaagcattgcaggaacctttacgtttgattttggtgtttctcgcaatgcgaccagtggagaagttggaacctatgcagaaagttccagcatcacaaagaaaatgactgtgtcctcgtatgacgatgcgtattcgcagatgcttgcggccgttcagtcctttgatgccttgggaaagttcggaatcgctatttcggacgaaactgacgatcaaggagagcattcaatcgttttgacttcatcgggcgctgctgacagcttttcggcaacgttgtgcaagtacattacggttacggaagtgaccagcaacatccagtttgaaagcacagaatacggtagctatgtgttggctgatggtgttattacgcagattgtcactactgtggatggctggacagcctgcaccaacgatatcgcgccgataaagggccgactaacccagacggatgccgaggccagaacgagttacacaaaccgtgttgcaagccgcggcaccggcacggtcgcaagcatcgtttccttgctgtacagcgatgtggatggcgtgacctttgcggctggatacgagaactacaacgatacggccgatgcggcgggcagacctccgcatagcattgaaattgttgtccagggcggcagcgatgaagatgtggccaacatcatctggaaaaacaaagcaggcggcattcgtgcatacgggaagcattatgcttacgctaccgacattaacggaaatcggcagtatctggaatttactcgagtgaatgacgtttatctgctgctctctgttacggttacgagttctggcgggctggacgatgattatgcggcgagaatcaaggccctgctgatggaagaaattctttcagcagggacaacaattcgcctgcaaacgttcatccgccccatcatggaaagcgtgtccggcgttgattatgttgaaatccgaggcttattgagcgaaaaaccggacattgaaggagttgccgataattctatgctgacaggcattgtcccggttgaaatcaaccaacagccggttcttagcatgagcggcatccgggtggtgaaagcatgattgacgcttataaggaaatgtatggcaaactgccgatgcagtttcaactggagtcttacgaagagagcaaactgggggactatatttgcgataccgtagatgatctgaaggatttaccagaagattgcgaaatgggaagcattgccagaattataaccccacctgcaatctatcgaaagaactcagccgggaaatggattttgcagttttccagcaagggagtatcctaatgggctacgaagttctgaaagaaacacctctcagcgttgaaaaaatgtcaaaccttgatggcatcatctgggccgttgcgccggaatatgaaaacgcctctctgtttctgggcggtctggaaaatctgaacaattttgatagctgcacaggtgtttggcttgaccggcttggacagctggtctgcttgacccgccagcaggctggagcaatgattggaagccgagagctcgcggataatgacgatatttatcgcgtctgcctgaagtataaggcttttgtcaattcctgccgctgcacgccggatgaaatcattgaagcgaccaaaatcatcttcggagcaacgcaggtggtttatagcgaacgccgagatgttccagcgacaatcttcctttcgatttcggcaccgttttctgatatggtcatgtctattttgggaacgcatgaccttattgtacgtcctgcgggcgtaaaggttcgcgtggactgctcgacagaggatgcggaaacctttggttttgtggatctcaatccgcgagttgcaggtttcggcgaaggaaagtttgcacagtccatcaattaactgggggtgatttattatggcagaaggtcgcgccggggcgcttgaagattatgcaacggtggcgttttctatgtctggcgtgaagcaagacatttcactggaggattggaagagcggctgggcttctattgttggtggtctaaaaggcaagccaacaagccagcagttcaacatggtcacatatattttgagtgccctgctgaatcaggccatttccgacttgtctactgtcaagggaacagcaaacagtgcattgcctaaaagtgactttacggcgaagcagatagtggctctgttggcagcatacgggctgatggaaggctgcgatgccgatacgatcgatggcaaacacgcgaatgctttcgcgccgtctacgcatgagcattcggcaagccagatcacaagcgggaaccttccgatagaacgcggcggtacaggttctggcaccgccgctgatgcctgcaaaaatcttggcgcaatgcgtaatgtgggaggtactttcaccggtacggtttattttgcaaatggaacggcgcactacattgcatctactggcgatgctcatgttaaatcgcttggagtcacggaggacgttaccgcacgccgtgtctatgatgctgtgtataacgactacgctgagttcatgccccgcggtgaaaacaccgaaccgggggacatcattgcgcttgatacatccagtcagaccgagagatatatcaaggctacaaatctgtccaatcgcattgctggcgtccacacggatgaatatgcaatgctcatcggtggcaacaaggttgaagaagggcaggacttccttgcgaggaacctgccccttttcatccctgtgtcccttgctggacgtgttcatgcaaaggttgtcggtccggtgcataccggcgattacatcgttctttccagcactcccggagttggccgcgctgtcggttcatgcgaggcgtatcccgcaaacaagattgttgggtatgcgtgcgaaggcgatgatcgcaccgatatgcgcctgataaaggtgagagtgggtggtgtgtgatggcaagagcgggcaatcagatatatgcgaccgattatacagatctgaagaagcagcttgatgctgaacttaaccgacgcggaaagtcggagggtacagcgcaagggcagagtgttggaagtatgtctgcatacatacagacctatacgacagcgcctgggtctggtcggcagattatcaatgagcacatccagaaaatcacacagccactttcagcaatcacaggaagttccatcacgcccgcaagcgggagtgaggttgcggctgatgttttgacacaggccgctgcggttctcagtcagcttagtgcgattcctgaaacgtcggcatccagcggatgctctggtgcctgttctggactttgcacaacggggtgctactcggcttgctcaagctgtaccggctcttgcaccggttcctgcaccggctattgcaccagatcctgcgcaaacgactgtgtgggttcctgcacgggaagttgcgtgagcacttgtacgggtacttgtaccggctcctgcacaaaatcttgtgcaaacgactgttccagtacttgtacagagacgtgcaccggctcctgtacgagcacctgcactggaacttgtacgagagcgtgcgccaatgattgcgctggcacttgtaccggaacttgcacgggaacgtgtacaaacacctgcacaagctcctgcacagggtcttgtacgggctcttgcacaaaaacctgtgcggataactgcaataacaattgcaaaacgacttgctcaggctcctgctctggtagctgtgatggatgctccagcacctgcgaaggaagctgcagcgcgaactgtgctgatagctgcgataacaattgcacgactgggtgcaaatcttattgtgcaaatagctgtcaggatagttgcgctggaacgggttgccttgctaactgcgaaagcggctgctcgaactcttgcagaggcgactgtaattcgcactgcggttcacagtgcactagcggctgcgactccagctgcgatggatgttcgggtacttgttctggtggatgcagtggcagctgtagtggaggctgcggtggccttttcttttaattctttgcgaaaaggagaaatatcatggagatgactattcattatgcaaaaaatgccgatgatggcatcgaagcatcgtatcttcgtaatttgccgatggtcaaattgcttcagcaggaaactgttgacgtggaagactgggagatgcttttgtcctccgtccctagcggcgaagacaaacttttctggtgcttgggctgcacgagttccctgtgtgcactggatgcaaccaactttgacgattggtttatttattgcaggacagtggtcgattccgcacttgaagcctgcaaaatcgacaatgcggcagaggagcgcaagaaccttttggcgcttggccttgcggcgagaacgtttaacttctcggcgaacccggtgaccgaagacctgaaatgtgccgatacgttgcgcagtgcaggagagtatgcctgctcggaagatgctgatatctttgccaaatggtatgttttgtgcctgttcacagtatacctgcgcctgaatttcaatgagaatcttcgggcgctgacatccgctatgggggccatgaacaaaatcagatctcgttaccgccaaatcgttgaacgtctccccaaaatggatgcctgctaaggaaggacgttagcatgaaaattgtagaactgactgcgactgagagtgaggccgtagagagggcgttttatgagaccaaatcttatgaaatgctgctttctgttttgaaccggcagttgaacgcaaatgcaaaccccgagacggccaaaatcattatgcactatgcagaactgtgccgtgcggcgcagatgaaactgaagatggcacaggacgcggttgtggcaaagtacatcgatttgaacgacagcgcttttgaccggtatctgttcgatttcagccgggaggaggtgcggttgtttgaaaagcagacggtttgaggattacggcaatacagttcaacgcctgtactgccgggatctgcccgaaatgaaaagcgtgtgtcgaaatgtcacgttccagattacgaatgcctgtaacctgcagtgctcatactgctatgagcaccacaagtccaccgagaaaatgacgctggaaaccggaaagaaaatcgtggattacctgctggacctgtatgaaaaaaatgattccgattttatcaatcagaacacaagggcggttgtcctcgacttcatcggcggtgaacccctgctggaagcgcccttgattgaaaaaatctgtgattattggtttgcggaatgctggcggcgcaaaattcctctggcaccgtttaccaggatcagttttgcgaccaacgggcaactgtggttcagccctgaagcacagagcctttttgcaaaatatcatgagttgatgtccgtcactgtcagtattgacggagtgcaggaacttcacgatatgtatcggctggatgaggctggaaagggtagcttttcaagggcgtgggcggcttttcaagatggaaaaaagtatggttggtatggttcaaagatgacctttgttccgggttcctttaagtatatcgctgacagcatcaagatgatgctgaacgagggatgcgaaagcatctcctgcaattatgcttatgagccggtctatgaaccgagaaacggccgcactttatatgaccagctgaaatccgtatcagactacattgtcgaaaaacgcttggatgttgttcttacgattctggatagcgcattgggaggaaaatccaaggatgacaaaaacttctgtggcggcacgggatccatgctgtgctttgcaccggacgggagcgcatacccctgtgtgaggtacgctcctatttctgttggaactgaaaaggccaacaaagtccgttttggcagtgtctatgatgggttgtacgctacggaaaaccagcgtcaggcaaaagctgacctcgatgcaatcacccgcacatcccaatctccgcaggaatgtctggattgcccggtttccgctggctgtggctggtgttccggcctgaactatgaattattcggaacggccaataaacgttttacaggcatctgctgggcccacaaagcgcgtgttctggcaagcgcctactatcataaccgcaggtacatcgaaatcggggactgcctgcccatcaaagcggaactgccagaactggatactttgacgattctgccctcttgggagtacgacgagttccttgaaattgagaaaaaagcacttgcaaaattcgctgatgcagtcggaatcagctgaaaggaggaacctttatggcaattcttattgcaaacaaactgctcgaaactgaaaccgaagcgtggtacacattttatgtggacacgctggaggatatcaaggatttgcccacaagcaaaacaaccggatcgtcttacaaggtcaaaaagctggcaaagccggcgagcattgcatactgcatcgaaatggcggcacagtatgcccttgatgataacgatgagtggagactgctttatgcgctgcgctccgatgttgcggacgctatcctgaaaaatgtggaagaaatcaagcagatcgttgccaataccagcgcatcggaacaggctgcggcgcggagcgcatctgcggcaaatgccagcgcaatcgcggccagcaagtccgaaaggatctccacagaaaatgcgtcttctgcggcggcaagtgagcgcgcatcgagggatagtgcatcagacgcaagagtagccgaaggaaatacgctgaactacatgaaccggacagcggacattgccaatcaggtggcgggatcggcggcatctatcaattttgcattcggaccggatgccgatggccgtttctccttttttgctcgcaggagcagttaaaatcacggaatccgtgattttctaacaaaaatcagatttacagatgttgcatggctataatctggaaaggagtttctatgttcaaagttatgcagcagtatggcaccgcagcccagccggccacggtgtactactgcgacgatgaagcagacctgcagaatatcaaatctgcaccgatgggggcgcaagcgctggttatccacacaggcaatatctacatagccgattctaccgggaagttctacccgatgtaaggatggtggcacatgattgatattttgacctacgcaatcgctcgcaggaaatcagcagcaaaattggatgaactgtatagtcagacaaaagctgttgcggatgcggcgaaagatagtgcagagaccagcaaggccgctgccgagacatcgaaggatctgttgaacaagacgacagctgcggcccagcaggctgcggcaagcgctgcttctgcaagctatgcacttggcccggacgagagcggccggctgtcgtttttcatcaagaaaagcacctaaaagggggtataagaaatgggtgacacatgggaacttatcaatcatcctatgagcgatgaaaccggtctggaactggccgctcagatgaaacgccaaaatgatattttggcaggcattgctgccggtactgccggcgcagaattcgtggatgcaacattccgcggtctgctggatggcaaaaataccacagaaatcttctggagctggtggccgctgtctgccggtgatggcgtgacgaagtatcagcgcctggaacgctttgcgaaaatgctcgcagagagcgctcgcagcaaaacctacaccgttcgcttctacagtgatgatgtgagtggtgattacaccggcaccccgctggatgatctggcagacgggcgtgaagcggctccgcttctgactgacaccagcccggaaaccgcagactggtcggaagaggatcctttcacatggtacattcgcgccaatgcgctgtccttggaagatggcaccatgaacgtgctggcagttgagggtgaaaccgggtttgacctttccggcgaaaccgcacccgtttactgcttcgctctgtccttgatgctgaaggagtgggaggatggcgcctatatctataacagctggcgcaccttctccggtggcggttatgaacctatggctggtgatgtagccccggataagagccgccgctggttgacatggcatcctgctttctacggcggtaaaaattccaagggcggcatgaccagcggtgctggactgcccccgatgccgtggacaagcgccaacgctgccatccctctggctcgtaaaatcaccgcttatgatgccctgtggactgactgcgaccagcagtatgttctggcccagtggcggctgcgccattggacgctgagcaacagcggcaagctggagggctgcacagtctacagttaccagtatacccccgctgcggccgaaactggcgtaaagcgggtgctcgtaacaaaagcgcagggtgcaaacttcattgttggctctgccgtttgcatgggtgagcgcggagaaaacaccagcactgatcgcaatttgtcctacaatcacgatattttcaactgggcaaagatttccagcattaccaatgtgaccgtgaacggcaccgagtatgcggctttgaaccttgagctggatgctcccatcaacactacgaccacgatgctggtatctactatgccgtgggagtccggcacgacagagtgcgtgccgggtcatagtgatggatgccgcgggagcctgaccaacggcaaatatccgtatcgcgtggctggcattgagatgcagattggtgcttacatcgaacagcttgaccctctgtggaaggccagcattgtggatgatgaccactggcactatgacgtgttctcctgcaagagcggtgaaaagcaggtcggttctatttcttctgactatgcccagaccggctcctttgacctgaacgacaaggcggcatggtcgtggcactatatccgcaagctgggcaagttgggcgcagaagccatgatgtatgaaaagttcaatggcagcggttctacctatgtacgggctgcgtttctttcgcccggttcggctggcctgtgcgccccgtggcgcggtggcgcccttggtggcggtgcttactgcggcctgccttgcgcgcttggcggcgtttccccggcgaactcgggctggtacggcgtgccccggcttgctggctcgggcaaaaagagagggtgaatatgtgccgtaggcacatagagggggtgtaaccccctaatccccgttcacgtttcccagcttgcgccgatggtttaccatcggcgcaagccgattattttatggagcaatgaagcggcgtgtggctgcgtttaattcgcccagttcggctggcctgtacgccccgtggcgcggtggcaaccttgatgacggtgctaactgcggcctgccttgcgcgaatggcaacaattccccggcgaactcgaactggaacggcgtgccccggaatgctgatgataaatagccctcaaaagggcataagcgtttcattgcgcctgtggcttgaccactaagatcatgttataccgacaccatgcagctgagcgtttcgagaaatacggacgcattggtgagagcgtggccgcagtttttgggactgcgtggcggtgagtagtagaaatccgttttgcctgatttaaggccagaagcggcaaccgaaatccgttgaacatcagcaagtttggaggctttaaggatatgaaaacaaagaggtacttgtcgctcaatcatgaaatgtgcgagcgtgctgtccttgaagcttttgataagaaatggttccgccgggattacctcgctacggtggaaaaatatggaggtgtaagccgtgcacaactatcgagcgccgcccgcgtaaacgactggaacccgcgtttagaagccgtaaatgggattgctcttgaaatggagcaacggatagaagatttgttggacggagaaacagacgaccttgatcttgaccctgtgagcgtgttctacagaattgatggaatcagcatgaaacggcgggaactgtctaactgctgtccaatgcaccaagcttttgggcatttggcggtacttggacttcgcccgttgcttcaggcaaaactgttgccgtatcaatttgccagtattcccggcaagggacaaatcgctttgaagcgtcaagtcgagcgttggcttcgcagaaaaagtcttggcatacagtatgcaataaagctggatgtgcagggggcatacgcccacacaaaacaggaacttgtgatgaagatcctgcagaaagaaatcccgggagcaacatggcttctggctgttgtcaaatgtcttttagcaatggctccgggcgagggattgcttatcggcggctatcttgaagcgtggctttttaaccttgttgccagctatatgctggtcaaggtcatgagttatgcaaagattcgccgtggagcatccacgcgattcgtgatccgcagcggtagctatatggatgaccttgttttgtttggccgacgatgggctgacatacagagtgcagcccgaaaattgactaagtgggcgctgaccgaactgggattgacaataaaaaacgagtgggttcgtgtggactttcttagcgccgctgaagagcatcaacgcagacacctaacgggagcggcaaaaggatgcccgggtttggatatggctggctatgtgatgcaccgtacctacaccacgatacgccccagaatttttctgagggctcggcggcagtacattcgagccaaggctgatgtttcacgaaatggatatgtgccggtctggcggtcatacaagctggtcagctataacggctattttgactggacaaaatctcgtgcaatcagcgaagccctaaaacagaaaaagctgttcacggccgcaaaagtagcaatccgcgtaacgacacaaagaaatgcaatgaagaaagtgaggatagcagcatgatttttaccgagaaccttgaccataatccgcaggcggtaacgctggaaaaactgccggacggtacggcttggctgtacctgcgtaaggacgctcatgaggtacgaaccgaggctcccgaaggagagcagggcggtacttcgtgggagtgcaccacggctctttgcaagttgggttccgattatgcagaggaaaccgtggaaagcatcacggcggcggctgatgattggtgggtctatgcagaagcatggacgaccgctgatgaagctgcgccctctctggaagagcgtgtgagcgtactggaaactctgtttatgggaggtgagctgtaatgggcaaggaacagttttatcgcactatgtaccgcatgaagaagatcaccgctgcaggcgtgtgggaaaaggttgacgagggcgagctgaccaaggcgcaggccttgcgtatctgcggtccgcgaccgaaggaatcctgatggaaggtgcttttatttgagccgagaacaaaagctcgaagttctgttagcatcggcggttcatcttctggattgctgggaggacatttcagctgaaacaggagaagagcctgaaaattatggtgagcagagagcaatcctgcaagccgaatacgatgctataaagtgttgagagaagccgtgctgatggtcagcgcggcttttttgtttggaatagaggtggattttttgatttctccgtataagggcactttcagagtgtcgcaggcataccgaaacctgcgagcaaacggtacatatcaccaaggatatgatctcgtgggcattggagacaaaagcatctattgcccggtttacggtacggttattcgtgctggatgggagtgtgcaacgcttccgaagaaaggttttggccagcgtgttgtggttcgtatcggcagcactgcctactatatgtattttgggcatctgtccaaaatcaacgtggccgtcgggcagaagctgaaaccgggagatctgattggtgttgagggcagcaccggccacagcaccggaagtcacctgcattgggaaattcgcatcaacgatatttctactgggtatgtatcggtgcatcagtacgcaggcatcccgaatgtggcaggctctactgcatacacgtccaactggatcgcagaacttttcggacccagcaacctgaaaaagtccaccagcggcttcccgcagcgcttgtacaattcggtgctgcagggtgcactgggaatcgacaaggacggtatcttcggggcgaataccgaaaaaacagtcaaggagttccagagtgctcacggtctgacagctgatggcattgctggagcaaagacaaaggcggctctcgctaagcagctttgagagaaaggggttataatctatgagcgttatgaatattgttaccgcctgtatcgtgattctgattatggcagttctgtccgtcgtggcgattcgcttcggctataaggcgcttctgatcgagtgggcaatcgatgctatctccaaagcggagaaggagttcgttggtaccaaactgggcgaggcgcgccttgcggttgttgtgtcttggctgcgcgaaaaggtgcctgcaccgattcgcttccttgtgacggacgacttaattcgcaaagcagtccagacatcgtttaacgctgcaaagtctgggctggaggtgctgaagaatgcttaagcggcttgtggattggctcttggatcgtcttcccgtaacgagatggatcgaattgctgacacagccggaggactgaaaggaggatgtaggtgcttgcagagacagctgaaacagtcactgtcgccgttccggcgtggcttttagcggtagttgcttttcttggaacacttctgggtggagcgattagttttgctgtgaatcaaatccttatcaagggagctgctgatcgtgccgcaaagaaacgcgaaaaggacgatgagcggcgccgagaacggtatattttgcagatggacagccgaaaggctacatttgacctgctatcctgcatttgtgccggcattgagcgaatggagaccgaaacgggtcagatttattggaatggagaactgaaaagaagccttgcacatctggaaggtgtggatgagcgatatagggaatccgaccaacgccagcttgccgacctgaatactcggagcaaatgattacacccccgttacccatcagactataagtcgaagtgggtaacgggggtgtttttttgcttttttacgataaaaaataacaagattcgtgataatctaacattttcctgacttttccagtggaaaaagttatcttttattgtaaggagcgagcgagaatatgattagaattttactgtccaagaagctaggcgagctgaaatggacgcaagcagatctggcacgcgccacgggcattcgccccactacaatcagcgactactacaacgaaatcgccgagcggatgaatctgaaccatttagacctcatctgcgaagcgctggactgcagcccgactgagatactggttcgggagccgaatcctgagccgagggtgcgaaaccggaccggctttgaaaagcctgtgacaggccaaagaaaagacggcgagtgagagaggggacagcgtaaagctgtcctctttttctatgcccattgacgcttcttgcaaacaggtgtattataataatgtatctaacacctgaatgaactacttgatagatagccaaagacccgtgacatcaatttgacagcaatccattgtgcactcaaaaacacacaatggaagcaacggaatttatgcacgccaaaaccggaaaaatggacttgatataaccaaaaacctactttccggaatcgagctcgagtaatccccaatagcaccatcaccccggagggtttcgtgaaaacgaaacctcccggggtgttttttcttctggtacggtcaaatagactgtaacgttcaaagtatctcctgtatcagagcaaacggtaacccttttatagcagtttgcgtttttaatgcacaagcaacatccgcaaactgcatatcgcaaatatgccattttgataggcacttttttgaaaattgcgataaacgcagtattttacacaaaaaagccctaaaccccttccttctccgcccgcaggggagtataataggatccgttgtttgtaaaataggaaaggggaagtatcaactatggaatcgaagcagaggcttttggagccgcagctcgtccaaacgggaagggcggatcagttcagccgcaaggtgttctgcgatggaatgcgggacggtgtgcccattgcgctgggctactttgcggtatcgttttcgctgggcattgcggcgcgcaaggcgggctttacgccgtttcaggggtttcttgtcagcctgctgaacaacgcctctgcaggagaatatgccgcatttgcgctgatcatggcaaacgccacctattttgaggtggcagtcataaccctgatcgccaatgcgcggtatctgttgatgagctgtgcactggcacagcgctttgcaccggaaacgcccttctggcatcggctgctcatcggctacgatgtcacggacgagctgtttggcattaccatcgcccgctcgggcagcctgaacccgtactatacctatggagccatcctgctggcggcaccggcttgggcttccggtacggcgctgggcattatagcgggcaacctgctgccgctgcgggtggtcagtgccctgagtgtggcgctgtacggaatgtttttagccatcattatcccgccggctcgcaaggaccgggtcgttgccgtactggttatcatcagctttgcgctgagctttctgtgcagctatctgccgggcatctcggcactttccgagggtacccgcaccattcttttaacggtggcaatctccggcatagcagcggttctgttcccggtcaggcaggaggaaaacgaagatgacgcataacaattatatctatattgcggtcatggcgctggtatcctatgccatccgtatcctgccgctgacgctgatccgcaagcctatcaaaaatcgctttatccagtcgtttttgtactatgtgccctatgtgacgctggctgtgatgaccttcccggccatcattcaggcaacgcagagcccggcagcaggtgctgttgcactggtagtcggcattgccgccacatggtttggcgcaagcctgtttcaggtggctgcgggctgctgtgccgtggtgttcgtgctggaattttttatctgatgccttatagcgagggaacaaaatgaagaagatccttgtaaccggtgcaggcggctttgtaggatcccgcgtgatgcagcaatgggcggggcgttacgagctgtgcgccttccccaaaggcttttgggcagcagcaggggaggatgccgtgcggcaggctatttttcagcagcgcccggatgtcattctgcataccgcagctatttcggataccggttactgcgccgaccacccggagcaggcttaccgcgccaatgtggagctgccggtctggcttgcccgtgccgcagcggaaacggacgcaaagctggtggctttcagctcggatcaggtctatgccggtgtagagcagtccggtccactgccggaaaccattccgctgcagcctgccaatgtgtatgggcagggcaagctggaaatggagcagcaggtgcaggcgctctgcccgagcgccgtgttgctgcgcgccacatggatgtacgacctgccgggctaccggctgcccatccggggcaacctgctgctgaaccttttgcgtgcggcacagcggggagaatctctccgcttttctgtccaggatttccggggcatcacctatgtccgtcaggcggtggcgctgctggagcctaccctgaccctgcccggcggggtctataacttcggcagtgagaacgctgaaaatatggtgttgaccgcccggcagttcgctgaaacactggggattacggtcgatattcaggaagccgactgggcacggaaccttgcaatggattgcagcaagctgcgggcgcagggcatcgtatttgacactacacagaccggtcttacgcgttgtctgcgggattatggattgcgctgacctcagagaatcaaatttttccgtatcgcacaaaaaacagagaaaagcacgaaaaaagcaggggattctgtatgctgccagcccgacagggtgggacaaatcatacggaaaccctgcttttttgcttatctgccggagaaaagttcgcttataggatgcagcatttcttcatgtaaaaagtcatacttattttacatcttatctgcattttgctataatgttttcgcttttttgcaaagcatccgaaccgcataaacctttaaaaccttgaggagagtggaatttttgaaggaagtcaagcttgaagaagcggcttatcagtttgaagccaaaatgtccctgcggcaggccattccgctgggcttgcagcacgtctgcgccatgttcgtgggcaacctgaccccgctgctgatcatcaccagcgcctgcggcattgcaggcggcgaatttgcagacctgcaggtcaccctgctgcagagcgccatgttcgtggcaggtatcgtcacgctggtgcagctgttcaccattggacccgtgggcggcgcagtacctattatcatgggtaccagttccggttttatcggcgtgttcaacagcgttgtgggcacgatgggcggcggtgtgctggcctatggcgcgattatgggcgcatccatcatcggcggtatttttgaaagcgtgctgggctttttcctgaagccgctgcgcaagttcttcccgccggtggtcaccggcacggtggtgctttccatcggtctttcgctgatttcggtaggtatcaactccttcggcggtggcaacaaggccaaggacttcggctctgtggagaacctgctgctggcactgttcgtgctggtggtcatcttgttcttcaagcactggaccaccggtttcctcagctcctccgccatccttatcggcattctggccggttatgtggttgctttcatcatggggctggtactgcccaccactggcgtgactgctgatggcgtagagttcaccaaggcatgggtgctcaactggagcaaggtggcgcaggcttcctggttcgcagtgcccaagctgatgccggtcaaggtggtatttgatgcccgtgcgatcctgccggtgctgatcatgttcatcgttaccgcagtggagaccgtgggcgatatctccggcgtgatggagggcggcatgaaccgtgagccctctgataaggagctgtccggcggcgtcatctgtgatggtctcggctctacctttgccgcactgttcggcgtgctgcccaacacctctttcagccagaacgtgggtctggtggccatgaccaaggtggtcaaccgcatggcactggcttccggcgctgtgttcctgatcctctgcggcctgatccccaagctgggcgcgctgatctccatcatgccgcaggccgttctgggcggtgcagccgttatgatgttctcttccatcgtggtcagcggcatccagctgatcaccaaggaaaagatgactccgcgccacctgaccatcgtgtccgtggcactgggcgtgggctacggcatgggtgccaacagcggcattctggcacaggctccgcaggctctccagctgatctgcggcgagtccggtatcgttccggccgcctttgtggcgatcctgctgaacgttctgctgcccaagaacgatatggcagagtaaaacttagttttttagccgggcaagggcttccagctgttgcaacacctgaggggtgtccgcatccagcagctccataggggctgcaatacagaccgtgcgtacctgcgcagggtactttttaagcagcacgttgccgcctttgttttccggcagggtgagcagttccgaaaaaaaactgcttccaaacagaacgggacttccgacaagcggtgccgggtcgttttcggccacggcacccagacggaagatctcccgttctgtttctttttgccattctgccggggcgggctgctcccgacagaagcgctctgccatgacttctaccgtctcccggcgcagcaggggctgatccccgggcagaaacatacagccgctcagttccggcagctgctccagcagcgccgaaagccccagccgaacggtatcattgcggccgggcaagctgtgcagcagcaccgggacgccctgcgtcctgcacagtgcctgtacatcttccgagcgggtcaccacgatgcgggcagcgataccgggtgtggcagtggcggcaaaagcccggcagagcataggctggccgcaaaaatctgccagcagtttatttgcgccaaaccggcggctcagcccggaagccatgatcacacagccgaccgtaagcgacttcttcatacaaaaacactccttcagcagcattttataatagtattataccgaaagctgtgctaaaataaaagaagagatatcgcagcgatagaaaagagaggtactgcacatgatgacgatccgagaatataagcgggcagaaagtctggaggaagcgtggcagctgaaccagaaaaagccaaaccgcattttgggcggcatgatctggctaaagatggaaaccatcaatgtcggcaccgccatcgacctttccggtctgggactggataccattgaggagaccgaggacagcttttccatcggcgctatggtcaccctgcgccagctggaacagcatccggggcttgccgcctatactcatggtgctatgcgggagactgtgcgccatatcgtgggcgtacagctgcgcaatctggcgaccgtgggcggcagcatctacagccggttcggcttttcggatgtgctgaccatgttcctagccatggactgtgatgtagagctgtacaaaggcggtatcctgccgctgcatgaatatgcccagcgcccctatgaccgggatgttctggtgcggctgatcgtaaaaaagacaccgatgcagctctattaccagtcggtgcgcaacagtcagaccgatattccggtgctgacctgcgccgctgcccggttggagaccggagattaccgcatcgccattggtgcgcgtccgctgcgcgctgtgcggttcgagctcccggcagagcctgcccttgcggcagaacagcttgccgcacagtttgcggaaagcataaaggcgcagatcgttaccggctccaatatgcgcggcagcgccgagtaccgcaggcatctggcaggcgtgctgacaaagcgcgcggtgctggaactggaacagcgtaaaatgcaggaggaaaagtaaatgcagatcacacttacattgaacggtgtccgggtatccgaggagatcgccccggatatgcttttgatcgattttgtccgtgcacatggctgcaagagcgtcaagcgcggctgcgagacctccaactgcggtctgtgcaccgtatttatggacgataagcccgtgctgtcctgctccgtgctggcagcccgcgccgatggccataagatcaccacactggagggtctgcaggaggaggctgccgagttcggtgcctttatcgcagatcagggcgcagagcagtgcggcttctgcaacccgggctttatcatgaacgcgctggctctgttccgggagcagccgtaccccactgaagagcaggtgaaggaataccttgccggaaacctgtgccgctgctccggctacgaaggccagctgcgcggcatcatgaactttctggcatggaaaaagcagaaggagggcgcacagtgaaaaccgtcaacaaaccgttccgcaaaaaagacgcgatgcagctggtcaccggacagcctgtttatatggatgatatcatcccgcaggactgcctgatcgtcaagctgctgcgctcgccccatgcaaacgccatcgtccgcagcatcaataccgctgttgccaaaaaggtgcccggcatcgaagccatcttcacttgggaggatgtgccgcaggatgcccgccgctacacgcaggccggccagacctacccggaagccagcccctacgaccgtctgctgatcgaccgccacgtccgctttgtgggagatgtggtggctatcgtagccggtaaagatgaaaagtgcgtagataaggcgctcaagcttatcaaagtagactacgaggtgctggaagctgttctggatttccacaccgcaaaggataaccccatccttgtgcacccggaggacaactgggagagccttgcccccgtgggtgccgacaacaagcgcaacctctgcgctcatgatgaatgcggcaacggtgatatcgacgctgtgctggccgggtgtgatgtggtcatcgaccatgtgtaccacaccaaggcctgccagcaggctatgatggagaccttccgcacctattgctccattgatacttacgggcggttgaatgtgctcagttctacccagatcgttttccacgtccgccgcaacattgccaatgcactgcacattcccaaatccatggtgcgtgtctccaagccccgcatcggcggcggttttggcgcaaagcagaccgctgtcagcgaggtttacccggcctttgtgacttggatgaccaaaagaccttccaagctcatcttcagccgcgtagaaagccagacggcttcttcgccgcgccacgagatggagatgcacgtccgtctgggcgctaccagagacggcatcgtgaagggcattgacctgtacaccctgtctaacaccggcgcttacggcgagcatggccccactactgtgggtctgtccggtcacaagtccatcccgctgtacggcaaggccgaggccttccgctttgtcagcgatgtggtatatactaaccatatgtctgccggtgcataccgcggctatggcgctacgcagggtctgtttgcggtggaatctgcggtcaacgagctggcacacaagctgaacatggaccccattgcactgcgcctgaagaacaccgtgcaggagggcgatgtgatgcccgcctattacggcgcggtaaataccagctgcgcattggaccggtgcgtgctcaaggtgcgcgagatgatcgactgggagcacaagtatcctgcccgggatatgggcaacggtaagatccgtgccgtgggcatgggtatggcaatgcagggctccggcatctccggcatggacgtgggcagcgctaccctcaaactgaacgatgacgggttctataccctgatgatcggcgctgccgatatgggtaccggctgcgacaccacgctggcgcagatcgccgccgaggtgctggattgcccgctggataacattaccgtctttggcgcggatacggattcttcgccctacgattccggctcctatgcttccagcaccacctatgtcaccggcaaggccaccgaaaagtgtgcactgaagctgcgggaacagatctgcaagctgggcgcagagctgctggaatgcccggcggatgccgtggaatttgacggcaaggtcgtgtttgaaagcgccgaccccacccgccaaaagactctgtccgagatcgcctttgcttcccagttcggccataagatcccgctggaatttaccgagacccacacctcgcccttgtcgccgccgccgtatatggtgggcgctgccgaggtagaggtggataccgagaccggcgaggtgagggtgctggaatttgatgcctgcgtggactgcggaactcccatcaaccccaacctgacccgggtgcaggccgaaggcggcatcctgcagggtatcggcatgaccctgaccgaaaacatcacctacgacaaaaacggctacccggaagagaattctctgttccagtacaagatccctgcccgcaacgatatcggccgcatccatgtggagtttgagaacagctacgagcccaacggcccctttggtgcaaagtccatcggcgaggtggtcatcaatacgccgctgcccgccatctcggacgccatttacaacgccatcggcacccgcttctacgagctgcccatcaccccggagcagattgccatggcagttgcagccaagcagtaaaggctgatgctgaacgaaaaagaacttccgtttctggcagagaaagggcatatcgtttctctgataggcggcgggggcaaaaccaccctgctgtatgccatggcagaccactgtgcccgcaagggctggcggatggttgtgatgacgaccacccacatccggcaatcggcagcctactatgcaccggatgacgcagcgcttaccgccttatggcaagcgggtcactatgcagtgattggaaccccggctgaaaacgggaagctgactttgccgccgcagcagcttttgcgccggatggcgcaggcagatgcggtatttatagaagcggacggtgcaaagcaccacccctgcaaggttccggcggcgcacgagcctgtgctgctgccccaaagcgatatcgttttggcggtagcagggctttcggcgctgggcaagcccttgcgggaggtctgcttccgctatgaaaccatccgtccgcagtttttagcggctgcgccggatgcgccccttacgccggccatgttggcgcagctgcttgcaagcacgcagggcggccgcaaggcggtgggtgaccggaagttttacgctgtgctcaatcaggttgatacgccggaactgcagcagcagggcatacaaatacaacagcttttgcgtcagcagggcatacagtgcgtgctgacgcatttcaaagaggaagaacgtgcatgagcaaggaagataagatcgtattctgtaccgggggtggctgcaccgcaaagctgggtgccggggtgctgagccgtattctggaaaagctgccccggggcgaaaaagacccggatcttctggtcggctatgacagccgggatgatgccgcagtctaccgcattacggacgacattgcactggtgcagaccgtggacttttttccaccgatggtggacgacccctatacctttgggcaaattgctgccacaaacgccctgagcgatgtctacgccatgggcggcgaggtaaagactgccctgaatctggtctgtttcccagaggatatggatctgaacgtactgggcgagattttgcgcggcggcgctgaaaaggtggcagaagccggcggcagccttgcgggcgggcattccatcgcggacagcggggtaaaatacggcctttccgtgaccggccttgtagacccgcaccggatgtacaccaacgacaccggtatgcccggcgacaagctggtattgaccaaggctttaggcgtgggtctgctctgcacggcaaaccgcgtaggtgaggccgccccggaggagatggaagcagctatccgctccatgaccaccttaaacaaaacggcggcagaactcagccgcaagtatcacgtccatgctgctacggatgtgaccggcttcagctttctcggccatctgcatgagatgatgggcggcaaactttcctgcatcatccacgcaaatgccgtgccggtgctgccgggcgcagaaaaagcagcggatgcatttttgtacaccgccgccgggcagcgcaaccgcaaccataccgggccgttcgtccggtttgaaaacgtaagcttcgccatggaggaggtcttgttcgacccgcagacctccggcgggctgctgctggcggtagacccggcggatgcagcggcactggagcaggaattgcgcgccgcaggtctgccggcaagcatcgtgggagaaatcctgccgaagcaggaaatcgagatcactgtaatagacaaatgagaggagtaatcagcatggctgagtttattaaagtagatgcactgggcgatgcctgcccgctgccggtcgtcaaggcgaaaaaggcgatttctgagctgcagggcgcgggacaggtggaggtactggtggacaacgagatcgccgtacagaacctgaccaagatggcacagcagaagtgctatcagtatagtgctgaaaagctggaagagcgcaagtaccgtgtgctgttcacactgggagaagcggcagacgccccggcagagcaggctcctgtctgcgtaccggatgcccgcaccgatacggtggtggctatttccgctgccgttatgggcgatggcagcgaggagctgggcaagaccctgctcaaggcctttgtgtttgcgctgacccagcaggacaagctgcccaagaccatcctgttctataacggcggtgcggcgctgacctgtgaaggctctgccatgctggaagatctcaaggcactggaagcacagggcgtggagatcctgacctgcggcacctgcctgaacttttacggccttaccgagaagctggcggtgggcagtgtgaccaatatgtataccattgccgaaaagctgacacaggccgggaacgtggtaaaaccgtgatctatctggataacgcagccacaactctgcataaaccaccgcaggtggaacaggctattctggaggcgctgcacacggcaggcaaccccgggcgcggcgcacacgagcctacccttcacgccgcacggatcgtgctggacacccgtctggcgctggcagagcttttccatgcgccaaacccctcctgcattgtttttgccgccaacgcaaccatggcgctgaacacagtactgaacggcgtgctgcatccgggcgaccatgtcatcacaacggtatgcgagcataactccgttctgcgtccgctgtaccggctgcgggcgcagggagtagaggtctcctttaccggcgtggatgacgttgcacggctttgctacgaccagtgggaaacgctgctgcgaccaaccacccgggcactggtggtgacgggggcttccaacgtgaccggcaacggcaccaaccttgcccgcgcagcagactttgcccaccggcatggtctgctgctgatcgtagatgctgcccagactgccggtgcacagcccattgatgtgcagcggctgggcatagatgccctctgctttaccggtcacaaggcgcttttggggccgcagggcacgggcggtgcttatgtgcgccccgggttacagatcgcgccgctccttgtgggcggcagcggtgtgcacagctttgacgaagcacaccctttacagatgcctactgcactggaggccggcacgctgaacgtgcatggccttgcagggctatgtgccggggtgcactggctgctggagcagggcgtagaatgccttgctgagcgggaaaatgctcttgctctcctgttttatgagcaggtgcgtactgcacctggtgtaacggtgtacggcgatatgaccatgcagccccgtgcacccattgtggcgctgaacatcggacaggaggattctgcccgggtggcagatatcttgtgggaggactacggcatctgcgtgcgtgccggggcacactgcgctccgctgatgcacaaggcccttggcacggccgagcagggcgtggtacggttcagcttttctcattttaatacggagcaggaggtgcagcaggcggcgcaggcagtttgcgcacttgcccgggagcttttatgcgaataaaacgaagctatatcgtgctttccttccgtaccaccttagaagctatggagtgggaaaagcaatgccatgtccgacaggtgcccgggcggctgattccgctgccgcgtgagatctcggcagggtgcgggcttgcatggcgtatgctgccggaggactggcaaagctggcaggcagaactggacgaaacacggtttgataaggtaacgcctgtggagcaataacagagggagagaaacaccaatgaacagacaaacgcttgcagacgttctgcaagatacaaaccagaccggcagctatacgctggctaccgtgctggaaggcgcagaggctggcagtcagctgctgctgcgggacggagatgccctgtggcagaccccgagcgctgagcttttgcagcgtcagcttgccgctttgcaagactgtaccgctacgggctttcttacactggacgggcagcgggtatttgccgagcgttttggtgcagtgccgcagctggtggtctgcggcggcggacatgtggctgctgcccttgtaaaacaggcaaagcttctcggcctgccggtgcttgccatagatgaccgggaagaatttgcccagcagctgcgcgccgctggagcggataccgtgctttgcgccccctttgcacaggcactccagaatgtgtccggcggagcagagacctattttgcggtgctgacccgctcccacgcctttgatctggactgccttaccctgatcctgcaaaagcccgcggcctatgtgggcatgatgggcagtcgtggccgtgccgcattggtgcgccgtcagctgttggagaccgggttggacagccagcgagtggagtcgctctgcgcacccatcggccttgccatcggggcgcagacggctgcggagatcgcactttccattctggcggagatcgtgcagatcaagaatgcccgccctcagaccgagggttatcccatcgcattgctggatgcgatggtgcaggcagaaaatgcacgcactccggcggtgctggcgaccatcgttgcacggcatggttccaccccgcgggatgtgggcgcaaaaatgcttgttctgcctgatggcagtaccgtgagcagtgtgggcggcggcattatggagcattacacggtacaggctgcccggaagatgttggcacaggctgcgcccgccctgcaatgcttacagctttcggctgacggcaaaaacgaggatgcggccattgctgcctgcggcggctccatggaggtactgttgcagacactttgccccggggaggaaacgaaatgaaaaaggacgctttgatcatcgtgcgcggcggcggcgaccttgccaccggtaccatccaccggttgtggagcgccgggctgcgggtgctggtattggaaactacaaaacccgcagccattcgccgtcaggttgccctgtgtgaagcagtgtatgaaggcgaaacaactgttgagggtctgcgcgctgtccgcattgaaacattagagcaggcgcagtccgtctgggcgcagagcgctgttccggtgctcgttgacccggagggagcctgtattgcccgggcaaagccggaggtcgtagtggacgccattctggccaagcgcaaccttggcacccatcgggatatggcaccgctgaccattgcccttggtcccggctttgtggccgggcaggacgtagacgtcgtggtggagaccaagcgcggtcatcggctgggtaggattatccgggaagggagcgcaatccccaataccggcatccccggcgtcatcggcgggtacggtgcagagcgggtgatccatgcacaggccgccggtgtttttatgaatgtgcgtaaaatcggtgatcttgtggagaagtgtgagaccattgccactatccgaactcaggaggggacagatatcccggtcaccgcacaaatttccggtatcctgcgcggactgctgcgcagcggctatccggtcacaccgggttttaaaatcgcggatatcgacccccggcgggaagagctttccaactgcttcctgatctcggataaatcccgctgtattgccggcagtgtattggaacttgtctgtgcgcaggtgtggcagtaaaacctatataaaaataacccctgccgttttgcggaaaggtctgcaaatacggcaggggttttaaggttctatgttagttgcggtagcagcgatcctgccccacaagccagttttcgcacaggcgctgggcttcctcaagactgcggctctcgcagtcaaagaatgcaccgcgcatagagcggtaggagtagtgtaccttaggaacaccgttgccatccttgaagcgctcgtatcgttcttcaccgggcatcagaaaaagctgtttcatggttccttctcctttgttttcaagcagtataaacggccgccgggcggcggcacacaacgcttgctattgtatcacgatggagatcggtttgccattgtctttttatccaaagatacgccagctttttctctgcggttgtgtcaaagaagggcttgacaaatcattcgtgcaaactgcgttccttttccagcgctgctttcatgccgtggatacgccccagtgcataggagagcattgctgcgcacaacaggttcaaccagccgtagcgagcctgatttagagagttcgttatgccaagaatcaggtttgccagacagatcagagaaagcatccgattgatgcggctcagatgcgtcagacgggagtcgatatccgagagcagctcaaagctgccaagctccgctttccgccggaagtacacccagttgacacagccgccgatatactctgcacccagctcctttacaaaggcgcggtaatcactgctggggttcatctccaagcggatgatatactcgcccggttcgcagcgcacaaaggtataaaaggaaaacccggtgttgtctagtacccagccctcctgtgccatctcgttcagccagcgctcttctttttcaaaatcccacacaaagaaaagcttgaaaacggttttcttttccttcataaggcttcctccttcaggatgctctcaccattggccacaagctgctgcaagcgggcaagctcgtgctttaagatctgtacgccctctgcggtaagctggtattcctttttgcggctgccgctctcagcgggcaggggacggatccagcctttttcgcacagagaggtcaaggcaccatacagtgtcccggcggcaagatggactctgccgccggaaagctgctctgtctgctgcatgatgccatagccgtgctgcggatggtaaagagacaacaggatataataggtcgattctgtcaatgcaaggttttccatactgaaatactccatggattctatcggacgtctttatatcgtcagccgatatatcgtacttaaagtatatcgtctcacgatacactttgtcaagtgttttcagaaaaaagtcatcaaaaagctttaagacacagttcgtatggaaaaaccgatggaatgtaggaaaatattttgtgcacttttcatagttttcttctgaagattttggtggtacaatatagtcatcaaattctgcaattcgggaggagctccatggcggaaaagtgtattgaactggatagtgtagagatcgcagcggctgtttttggcaactgcgaccggaatattcgcttgttggaaaaagagttttcggtcaccgctgtctgccgcggtacacagctgcgcatttccggtgagcctgccaacgtggcggcagcgaaccgagccgtggagggaatgcttcttctgatcgagaaccgcaccccgctggaggatcagactgtgcactactgcatcagtttggcgcacgatggcgcggagaagcgggtaaaggagctgaccgaggattttgttactgtcacggtcaagggacgaccgatccgccccaaaacgctggggcagaaggaatacctgagtgccatccgttccaatgccattaccttcggtgtcggcccggcgggtaccggcaagacctatctggccgttgccatggcggtaaaggccttcaaggctaaagaggtctcccgcattattctgacccgcccggcggtggaagcgggtgagaagctgggctttttgcccggtgacctgcagcagaaggtagacccctatctgcggccgctgtatgatggcctgtttgatatgctgggcgcagagacctacgagcgtctggtggaaaagcagatcatcgaggttgctccgctagcctatatgcgcgggcgcacactggatgattcctttatcattctggacgaagcgcagaacaccaccccggagcagatgaaaatgttccttacccgtatgggcgtaggctctaaggtggtcgttaccggcgatgtgacccagatcgacctgccgggcagcacccgcagcggtctggtggacgcgctgaaggtgctgaaggatgtgaacggcattgcacagtgctactttaccgataaggacgttgtgcgccaccggctggtgcaggaaatcgttaaggcttacgagcgtgccgcccatccggctgccgaagcggaaaataaagaaaacaaaaagaattttaaataaccctttgaaaggagtggaccgatatgtccaacaaagttttgatcaccaactcccagaaagctgtcaaggtgccctccgggcttcgcatcctcatccgccgcgcctgcaacgctgtgttggagtatgagcattttgaccgtcccgcagagatcagcgttacctttgtggacaacgctgccattgccgagctgaacaatcagtatcgcaacaagcccatgcccaccgatgtgctgagctttcctctgggtgaggacggcaagtatgatatcgacgagaacaacggctgcatgatgctgggcgatatcgtcatcagcatggagcgcgccatggagcaggccaatctgtatgggcatccgctgcagcgggaggtggcttttctgactgttcactccatgctgcatctgctgggttacgaccacgaaaatggcggtctggaagctatgcgtatgcgcgaaaaagaagaggctgtgctgctgcagctgggtctgccccgcacggtcagctacacggaatgatatccctttgcaacagaacataaaaacaagacaggagttcgctttgagtactacaacacccgttcaggagcattacgacacctcctctgtattcgttgctgtcatcggacggccgaacgtgggcaaatccagcctgacgaacctcttggtcggcgagaaggtggccatcgtcacctctaagccccagaccacccgcacccgcattaccggcgtgatcacccgtgggccgctgcagtatgtgctgctggatactcccggtgtgcacaaggcgcacaacaagctgggcaagcgcatggataagaccgccagcgattccattgcggatgtggatgtttccatgatgctgttcgagccctacggtgcgttgaacgaatctgagatggcgctggtggaagcgctgcaccgcagcggcccagccattgcggtcatcaacaagactgaccttgtgaaagaccctgccgatttggaagcccgcaaggcagagctgaaggcactgggtgtgtttgatgcaatctacaccatcagcgtgcgcaacaaagaaggcagcgaggagctgtttgatgctctgagccgttacgccgtggaaggtccccattactttgatgatgacgcctacaccgatatgccggaaaaagagctggtggctgaggtcatccgcgaaaaagcattgctcttcatgcgggacgagatcccgcacggcattgcagtggtggtggagcgcttcaaggagcgcccgggcacagacctgatcgacattgatgtgaacatctactgcgagcgggagagccacaagggcatggtcatcggcaagggcggtgcgatgctcaaaaagatcgccagtgctgcccgcgccgactgcgaagaatttctgggctgccgggtcaacctgcagtgctgggtcaaggtaaaatccgactggcgggacaacgagtttttgctgaacaatttcggctttaagcagaatccctccaaccgctgagcgctgccaaagcaggacagttttcccttgtatgctgtgctagaatcaggctgacactataacaaaagcagcctgtgtacaggaaagggaaggagtgctgaaaatggatgctgctgcaagctggcaggcctttgcctgcacggggaatattctccgttatctcgattacaaacaatgtgtgcagctgcccgccgagcatccggcaggagaaacggatgatggaaccatttgtgaccatgggtctggtactgaaggagacccgttatagagaagcagaccgtattctgacgatcctgaccccgaaaatgggcgttattacggcaatggctgcaaacagtctgcggttgaaaagcaagctgttcagcgcctgcgggctgttctgctattcagagtttacactggtgcccggacgcaatatgtataccgtgcgggaagccgaggtgcagaacatcttccatggtgtttcttcctccattgaaggggtaagccttgctatgtatcttaccgagatggctgctgcgctttcgcctactggagaggaagcagcccgggagctgcggcttgtgctgaacagcctgtatatgatcagcgagcaccgcaccgacctgcgggtgatcaaggcggtatttgagctgcgcaccatgagtgagtgcggctttatgccgcagattgtctgctgccgggactgtggcacctacgatgaaggagatgccttttatctggacgcacaggaagggcatctgctctgtgcagcctgcgccgcaaaggcaggcaagaactgcaatctagacaaggctgcgctgtttgcactgcgtcacatctgcttggtagaggacaaaaaaatatttgcattcaagatctctgtgggcagtctggcaaagctttccgcagtggctgaaaactatgccctgacgcatctggataagccgctgaagagttatgcctttttgaaaagcgtgctgccctgaccaaaaaggaacagtatggaaacaagctacttaaaaacattagaattggataagatcattgcccgagcagcggagggctgcgtgtgcaaggaagcccgtgctatgctgctggccattgagccgcagtgcgacccggatgaggtgcgctacgcactggaacagacggacgccatcaacactctgttgatcaaaaacggctcaccgcgctttggcggggtagagggggtcagccagcttgccgcccgtgccgtaaagggcggtgtgctttctatgggcgagctgctgatggtggccggtgcgctgcgcaattttcagcacctgaccagctggtacggctcctctgagcatgatgttctgccgaccgatgatctgttttacgcgctggcaccggaaccgggtcttgagcagcagatctccagtgccattctggcaccggatgccatggcagataccgcctcccgcacgctggcagaactgcgcaagaagatccgcgccactgaaaacagcatccgcgaccggctggaaagcatggtgcgcaacatggatacctccaaatacctgcaggagagcgtagtttccatgcgcaacggccggtatgttgtgccggtcaagagcgagtaccgcggtgaggtgagcggtatcatccacgatgtatcctctacgggcgctacggtgtttgtggagccgcaggctgtggtggaagccaatgcccgcatcctgcagtaccgcgcacaggaagcgcaggagatcgagcgcattctggtggcctttaccgcacaggtagccgccattgaaccgcagtttcagtacagctacaaggccatgctggaaatcgacatcctgctggcgaaagcacggcttgcgctggagctgaaggccttcaagcccgctgtgcggacggattcttcttttaacctgatccgtgcccgccacccgctgatcgacccgcaaaagtgcgttcctgtggatattgcactgggcggggaatacgattcccttatcatcacaggtccgaacaccggcggtaaaacggtcaccctgaaaaccgccggtctgctgtgcgctatggcacagtgcggctttttgatcccggcagacgagcgcagtgagatctgcgtgtttgatgaatttttggtagacatcggcgatgagcagagcattgagcagagcctgtccaccttctccggccacatgaaaaagatcaccggcattctggagcttgccatgccgcacacccttgtgctgctggacgagctgggtgccggtaccgaccctgccgagggtgccgcactggctgttgccatcattgaggagctgcgccgccgtggtgtactgctgatggctaccacccactatgcggaactgaaggtttttgcgctggagactaagggcgtggtcaatgccagctgcgagtttgatctggagaccctgcgccccacctataagctgagtgtgggcgtaccgggcaagtccaacgcattcctgatcagcgaaaagctggggatacccagccgtgttatcgaggctgcccagcagcatctgtctgccgaggataaacgtctggatgcggttctgggtcagctggacgatctgaagctgcagctgaaggaaagtcagaacgaagtggagcagctgcgcaacgaagcttctcatcagctggaagccgcccgcaaaaagcgggatgagctgatccagcagggcgaaaacgaattggaagccgcccgtgccaaggcacgtacactggcacagcaggtggaaacacaggcctacgcgctgaccgacgaactgcgccagctgcaaaaggacgagcgcatgagcgcccagcagaaggcacagcgcgcccgcgagattgccaaaaaggagaccgaaaagctgtttgccggtacggaggtggtgcataaccccgtcaaggagtttgtgccgttgaaggaggtaaaggtagggcaggaggtctgcattgcagaactgaaccaactggccaccgttctggcgctgccggacaaaaacggcgatgtgctggtgcgtgccggtatcatcaagaccaaggtacccctcaagggcttgaagcagccggaaaaactggtaaaagagcccgccgcgcccaagaccaaagcgcagcagcggtactcccgcctgaccggtgatacaaaccgccccaacggcagggtagagcgcgtacagcgcaccgcaaaaatggagtgcaacctgctggggcttacggtggatgaggcgctgtcagaggtggattcctttattgaccgcgccatcctgaacgggcagacggtggtctatctgatccatggcaacggcaccggtgcactgcgcaccgccatccataagcatttgcgcggtaaccgcatggtaaaaagcttccgtcttggccgttacggcgaaggcgaaagcggcgtgacggttgtagaactgaaataacccagtaaggactgccttttgaaaaattggcagtctttttttgttgcagcgcagggaaaaggcgagtatactcgtattataaatgtaaaacgaacaggaagtaaaactttatgccaaccagtcatcgcagacctgcaaataaacatagcaaacataaaacacgccgccgcaaaacacagcaccagtttttacgcggtatgctgtttgtttttgcggtgctgatgctcggctttggcctatttttatggaaggcggcgctggaactgaatgcacccgcagaacccgcagtctcagcatcagaggatgattttcgtcctgtggtgggcgacccgccgtaccgggtggcaatagacgccggacatggcggcagcgacccgggcgcaaggggagtggtcgaggaaaaacaggtcaccgcagcaacggctgctgcgctgcttcaatggttagagcaggatccgaattacatccctttgcagatccgggaaagctttgatgaaaccgcgacacctgcccaacgtgcagccgccgccagtgcccaaagcccgcagctactgctgtccatccacggcaactccgcagccaacggctctacggcatccggctttgagtgctatccggcagtgcccgggcgcacatggcatcaggaaagcttttattttgcccggctgctggccggaggaatgcaaagcatcggcgcaaagctgcgcggacgtgggggagtgcgttacatttattatctggaaaacgaccagaaacagctggtggaaaacacctacacacaggtgcggaacgaacgcagttttacgctgctggaagatgtggattgtccggcagtattgtcagaacagtgctttgtgacaaacgtcgaggatgtagagcgatttggcagcgaggagggctgcaagactgtggcgcgtatttattacgaagccatctgtgcgtactttggcacagaaccgctgccattgaaatgagcatcgcatcaccaaagcagaagaagcgatactgcttatataacatgactggtaacgcaccagaacagccatcgcaggcagaagtcaaacacttgaacgtactggtaatacgtccagcggtgtagatgcaggcgtatgcaaactgaaacgcatccacagaagctgccggaaatctgacagaaagagagaagggcagcttctgttttttgattatagttgtttcgtataatgcacgttatgcgaaacttagggaagtgaaaaaagcccatttcccggatttttggcgttccggcctcggctggctcatttttcggcttggcttaaccgttctacgcattctgcactttttatcatgttttattgttttctttgtctcacgcttacagatacttcctgtgttatgcgctgcttcattggttcgttagtaattcattttgttctagcaattttattccagcaagcatctctatgcgcttgctttataacatttcatgttacggctatggttgttcagttactaatgtaaattataaagacctatgactttaatccggtcaagccggatcgtgtcataggcctttgcatcgtttcaagcgctattcaggttataagatcttagtggtttaagtatcgttcgatgagtcgtcggtttcttcggcagacattgccgagatatctgctcggaagccatcctgtgcagcgccctcaaaggccgccatagggccggacggctcagaatcgtcctctcccgccggggcattttcggcagatgtctcccctgctgcttctgttgtatccaagcttgcttttgcagcttttatgggcagtaccttgcccaacggattttcttcaatggcagagcgcacctgaaattcttgcaggtgcgtataaatttgcgttgtcccaacgctgctgtgacctagaagctgcttgagggtgaggatatccacattgccggtctgatacatcagggttgcagcggtgtggcgcagcttatgggtggaaaagccattcagtccggcagccttcattgcgccggagatcagctgttctaccctgcggttcgagatacgctccttgcgcatccgcgtaatgaacacggctttttccttgggtgaaagtccttccatagtattgcgcttgcgcagatacaactgcaacgcctccacacaggcatcattcagatagaccatgcgttccttatggcctttgccaaacaggcgtatctgccgctgctccaaatcaatgtctccaaggtccatgcctaccagctctgcaagacgcataccacagttgagaaacagcaccaccatgcagtagtcccgctccgggaaatcgctctgggtctgggtgctctccaaaagcgagatggactgctctgctgtcagatatttgggcaatactttatcctgcttgggcgggcggatagccgccgtaggatcctcggttaagcggttgacctgattgaccagataatcataaaagccgtgcaggctggccagccgccgggcggtagaggattttttgttgccgcattcccggttcagaaaataaagatactcgtagatgtcctcttttgttatgctgccccagaaggctgtgtccagccccttggggtcaatttctttaaattctgcatctgttggcacaagaccgcggcggcgcttcataaagcggctgaaagagcgcaggtcacagtaataattgaaagccgtgttggcacttttaccggcgatcacctcaagataccgcacatattctacaatatccggggcggcatcctcaaagggcgcgtgcttaccggggtttctttcgtccagatagatcgacataggttcctcgtttcatcacaggcggtcgtttttcagcgcattgatggcatctgaaatataagctgcgccgaccagcttcatgccgggataatctgcggcattcaggtgtgcaaggctgtgcttggggataactgcacgctcaaagccgatacgttcagcctcgtgcaaacgctgctccagattaggcacgctgcgcacttccccgcccagacctacctctccgatggcgataagcttatcgctgaccgggcggtccagcagcgaggagaccatgctcaggcagactgcaaggtcgcaggcggtatcccgcaacgcaatgccgcctacaatgttaacgtagacatccagattgccaaagaagtaccctgcccgcttttccagcacggcgatcaaaagattcatgcggttatagtcgtatccgctgcaagcacggcgaggtgccgggaaattcgtcttggtggcaagcgcctgaatctcgctcaggatgggacggctgccctccatggtgcaggctacacagttgccggagacccccagcggacgcccctccagcagcatctgggaggggttttcgatctcggcaagccctgtgccggtcatgtcgaacattcccagctcattggtggagccgtagcggtttttggctgcccgcagaatgcggtacggcagcatcttgtcgccctcaaagtagagcactgtatccacgatatgctccatgaccttggggcctgcaattgcgccatccttgttcacatgacccacgatgaacatggggatttcctgctttttagctaccgccagcagccgcgcggcactctccttcacctgactgactgtaccggacgaggacgagatatccatgcagcgcatggtctggatggaatcaatgaccacaagatccggcttttccttttcaatcaggccgcagatctcatccacgtcgttttctgccgccagaaagatgttgtcctgcggtaccttcagccgtgcggcgcgcagtttgacctgccggacagattcctctccggtgatatacagcacgctgtgctggttagagatggcaccgcacagctgtagcagcatagtagatttaccaacgcccggctcaccgctcaaaagcaccacgccgcccagcacgataccgccgcccaatacacggtccagctccgagataccggtcaggatacggcttttttcctcagtcgtgctgatctctgacagccgccgggcggtcagggtggtcacgccctcctgacgagccgcagcagcctgccgggcagcaggagtccctgcctttggagcttcggcaacaacgtcctcgttcatggtattccagctgccgcagctggggcagcgtcccatccagcgggggcttgtctctccgcaattggagcatacatagacggatttcagtttcatgtctgtccctcatttatttatggtcttttgttattgtaacacactgtaccaaaacccgcaagaaaaggatactgttcacaggcggcttcccagatacgaaagccctgccgccgcaccgcacagcggcagcaacactaccatggtcagcagatattgtcccagcagtgtctgcaccccggggcgggcttgtccgccggaatgcttgcggaaggaataggcgtggattcggctgctgacctgcaaagcgcaggccccgaaaaagcacagacagccacttgctgctgccgccggtaagcctgtccacagcagtgccgagagcattgttttccacccgcctgctgtgcaaagctgtaccatgagcagaccgctgcccaaaccgtacaacatcatgctgccaaagatcattataggcccaagggcagacagccctaataccagaaacaggctgaccacaaggccgagagccagatattccatgctaaaaagctgtaccgtcccttgcatactgcccggtgcaaacagcccttgccacgcttccagataataccgcagcagctctgcctgccgggcatcgcatacggcctgcaatacaccggctgccgaactccccagcagaaaggccgcagccagcagccagcaatcccgggtggcgtgccgctttgccgggatgcagggctcttttgatggcaattgctctacgggttccggtgcagttgccggtacagtcggcagagcaggctctgctttctgcaccggcagactgaccgtctgtggcagcaaggacaggttttcctccggtttggtctgttcatagatccacatacgctgttttctcctctgatggattcgatttgccggatcgatcaacgaagcgtgtgcctgcggctgcgcagggtgaccccaagcagccctccgatacagccgcagagcagcaccgccagaatacggcacactacagccggcgcggcagcggttccgttccacacagcggaaagcgccagcggcactgccagaaatgtactttggagcagtccggtcaacagaccgcgcgccttttttcggaacgctgccgccagtgcacacagcaaactgcccatgcatacggctgttgtggcaagtatcggcactacgctgccggagcagccctgcccggccatcagctgcgcaaaaccagccagcgccgccgctgttacggccacccccagcgccccgaaaagcgcaaacgaaagaagctccgccgggaaacctcgagactcagacataacaaaaccgcctccctgcacatagtctatgcagggaggcggttcatgtatgcacggttaagtgcttacttcttatcggcaggagccttgtccatgttcagcttttcgaccgaagagatagcagacttggtgaagcggatcttcacgcggtcagcgccggtctccagaacaaaggtgtcgtccttgatggcgacaacgcggccaataacaccgccgatggtagtgacctgatcgccgatctccagactgctgcgcatagcggcatccttcttttcctgcttcttctggggacggtagatcatgaagtacagcaggaccagcatcagtgccagcgtgaagaacaggctgatatagccttcggacgtggtagtcagaaattgcatggggcaaaatctcctctcaaaaattcagataatgctattataccctcttatcggccttgttgcaaggctaaagtttaaattcgggtatccagaagcttcacgtatctgtcgtggaaggcggtaaaggtaccggcatccagttcatcccggatacgctccatcaggtggttgtagaaccacagattgtgcatcacggtcaggcgcatacccagcatctcgtctgccttgagtagatgccggatgtaggcacgggagtaattacggcacaccgggcagccgcaggcggggtcgatgggacgctcgtcccgctcgtacttggcatttttgatgttgatgataccgctccatgtattcagatgaccgtggcgggcattgcggctgggcataacgcagtcaaacagatccacgccgcgggcaacggcctcgatgatgttgccgggggtgccgacgcccatcagatagcggatcttgtccttgggcatatacggctccacctgactgatcatctcatacatcacctcggtgggctcgcccacagccagaccaccgatggcgtagccgtccagctccagctcggcgatctgcttcatgtgctccacgcgcagatctgcataggtgcagccctgattgatgccgaacagaagctgatccgggttgacagagatgccctcgtgcttcaggcgtgccatctcagccttgcagcgcttcagccagcgggtggtgcgctcgcagctgtccttggagtaatcgtgctgggcggggttctccacgcactcatcaaaggccatggcgatggtagagcccagatttgcctggatctgcatactctcctccgggcccataaagatgcggtgaccatccagatgagaggcgaaggtcacgccctcctcggtgatcttacgcagctttgccagactgaacacctgaaatccgccgctgtcggtcaggataggcccgttccagcgggtgaacttgtgcaggccacccatatctgccaccagcttgtcgccgggacgcagatgcagatggtaggtgttgcacagcatgacctgcgcgccgatatccttcagatcctgcgccgacaggccgcccttgatggcaccggcggtggcaacgttctggaaggcaggggtctgcaccgtgccgtgcacggttttgaactcgccccgccgggcgttgtgttcctgcttgagcagggtgtaggtcgtcaaagaaggcatggtcttttcctttctgcgcacggaaaacagccgtgcagcctcgatgcaggcagtaagcctgcaagttatcagaatgatcacagcagcattatgccgcaattacaaaaaaatcacaaaatgagcatagcatcgccaaaggagaagaagcggtacttctctgccacggctacttcataggcgtgcatggtcttttcgtagccgtacagagcggacaccagcatgatcagggtgctctccggcaggtggaagttggtgatcaggccgtcgatgcagttgaacttcacacccggatacaggaagatggaggtgttgccgctgcaggctttgatctcgccatacttggcagcagcagcctccagcgtgcggcagctggtagtacccactgcgatgacccggtggcctgcggccttggtctcgcggatgcgccgggcggtctcctcgctgatggagtaccactcgctgtgcatcttgtggtcggcgatctcgtcctcctgcacaggtcggaaggtgcccagaccaacgtgcagggtgacctcggcaatgccgacccccatggcgcggatggtgtccatcagctccggggtaaagtgcagcccggcggtgggagcagctgcgctgcccagctccttggcatagacggtctggtactggctctgatcctccagctgctttgtgatgtagggcggcagcggcatcttgccaaattcatccagcttttcataaagcgttgcggtatcataatagaatgtaacgtacttgttgccgtcctccatggtctcgtccaccacggcggtcagactgccgtcgccaaagctcacctttgtgccgggctgcatccgcttgccgggctttgccaggcactcccactggtcgcccttcacctgccgcagcagcaacagctcacacacggcaccggtgggctgcttgacacccacgatgcgggcgggcagcaccttggaattgttcaccaccaaaagatctcccggctccagaaattccggcaggtcgcggaataccttgtgccggatgctgtcgtccttttggctcagaaccatcagccgtgccgcatcccgaggggacgcaggttcctgtgcaatgagctctttgggtaaatcataccaaaaatctttttttaacatagtgtgcatttgcctttccgatgattgacacggacaacgtatcaatgatattatagaatctgtataaacagtatctattatattgcatcgctgtccggtttgcaagccgtgttgtgcacaatgataagatttgctgtttgttttttgaaaggaaaggtgctggaaatggatagacagtataaagtgggtatcgtaggcgcaactggtatggtgggtcagcgttttgtgactctgctggagaatcatccctggttcaagctgaccgtgctggccgcatccggccgcagtgcgggcaagagctatgaggatgcagtaggctcccgctgggccatgaccactcccatgccgaagagcgtgaagaagatgaccgttctggacgcttccaaggtagaggaagttgcttcgcaggtggattttgttttctgcgctgtcaatatgcccaaggatgagatcaaagcactggaggaagcatacgccaaggctgagtgcccggtggtctccaacaacagtgcccatcgtttcaccccggatgttcccatggtggtgcccgagatcaacgccgaccatatcgagatcattcccgcccagcgcaagcgtctgggcaccaagcgcggcttcatcgctgtcaagtccaattgcagcctgcagagctatgtgcccgccctgcatcccctgatgaaggactttggcgtgagcaaggcgctggtgtgcacctatcaggctatttccggcgcaggcaagacctttgaccggatgcccgagatcgtggacaatgtgattccctacatcggcggcgaggaggaaaagagcgagcgcgagccgctgaagctgtggggccatatcgagggcgaccagattgtcaatgctgaaaagccggtcatcactgcacagtgcttccgtgtgcctgtctcggacggtcacaccgcagccgtgttcgtaagctttgataaaaagcccaccaaggagcagatgctggaagcttgggcgaacttccgcggccctgcacaggaactgaacctgcccagcgcacccaagcagttcctgcactactttaccgagcccgatcgtccgcagcccaagctggaccgcaacaccgagaacggcatggccgtgtgcatcggccgtctgcgggaggacaccctgtttgactacaagtttgcctgcatgagccataacaccctgcgtggtgctgccggcggtgctgtgctgctggctgagctgctggcagcaaagggctatatggactaatgcctgaatttttgcgcgatacacgcagcaaaggagttttttactatgaagaagcctgtctttaccggcgcgggtgtggccatcatcaccccgatgtacgaggacggaagcatcaactttgacgagctgggccgcattatcgaggatcagatcgcccgccacactgatgccatcatcatctgcggcaccaccggcgagtgctctaccatgaccgatgaggagcagctggccgccatcaagttcgccgtggatacggtcaatcaccgcgtaccggtcattgccggtgccggttcgaacgataccgaccacggctgcgcactggcagcaaagtctgctgcctgcggtgctgatgccctgctgatggtcaccccctactacaacaagacctcgcaggccggtctggtggcacactttaccgccatggctgaggctggcggcatcccggtcatcctgtacaatgtgccctcccgcacgggtctgaacattgcacccgagaccgctttggagctgagcaagcacccgctcatcaacggcatcaaggaggcctccggcaacatttctcaggtggccaaggtggctgcactgtgcggtgatgcgctgaacatctactccggcaacgacgatcaggtagttcctctgctggcactgggcggcaagggcgtcgtcagcgtggtgtccaatgttgcgccggagctggtgcataactgctgtcagactttctttgacggcgacaccgccaaggcctgcgctttgcagctggaaatgctgccgctggaggaggctctgttctgcgaggtgaaccccattccggtcaagtacgccatgaacgtgctgggctggaacgcgggtgagtgccgtctgccgctggtagagcccagcgatgcccacaaggcaaagatcgagcaggctctgcaggctgcaggtcttattaaggaataacaacagcgtacagaatgcccgggaatcttctgcttccgggcattctgccatattatagaaacgagggaataacaatgacagagatcgtgattcaaggcattggcggccgcatgggccatgtgctgtgcgatatgattgcacagcgggaggattgctgcgtggtggccggtatcgatatgcaggacggcgagcagaacggtatcccggtctacgacagtctggaaaagctgaacggcaagggcgatgtgatcatcgacttcagctcccctgctgcagtggaaaaggcactgccctactgccagacccacaaaatgcccatcgtggtgtgcaccaccggcctttcggaggagctgcagctgaaggtagtgcagctgtcccgcagcgttccggtgttcaagagcgccaatatgtccatgggcatcaatgtgctggccgagctgtgcaagcgcgcctctgctgtgctgggcatcaactatgatatcgaaatcgtggagcagcatcaccacaacaagctggatgcacccagcggaacggcgctgatgctggccgatgccatcaacgaggaaaatgacggcgcgtaccattatgtgtacgaccgctcttccgtgcgccagaagcgcgacccgagggagattggcatcagcgctgtgcgcggcggcagcatcgtgggcgaccacgaggtgctgttctgcggcccggacgaggtgatcaccctgcggcacaccgcctactcccgcagcatctttgccaacggcgccgtgaatgctgcggtctatctggcaaagaaggagccgggtctgtacgatatgggtgacctgatcgccgccctctgaaaaataagctgccccggcatacgccgggagaagaggtgaacgatgaagcaggagcctttaaagcggcggcgtccggctgcccgtaagcgcggccgaaagcaaacgctccgggcggtggtgctgtcggttcttacggtgagcgtgatagcactgtgtctggggatctggacaagactgccgggagaagatgtaccggtgggcggcattgcgccgccggaggatacgctatcccctgcttcatctgttgcggcaccggagccggaacctgaaccacagcctgtggtagagaccatccgcttttccgcagcaggagataacctgatccactctcccatttataatcaggccgcccgccgggcaggcgaagatggaaagtacagctttgattactgttatgagcatatcgctcctttctatgctgagcaggatgtaaactggatcaatcaggagaccctttgcagcgacacccttgcaccctccacctaccccagcttttccacccccggcgactgtgcgcgggcgctgtaccgcgccggggtgcgggtgttcagcctttccaataaccacacctacgacaagggcgcgtccggtattgcagccactctacagttctgggagtctatgccggaggacgtggtcaccaccggtctgtggcgcggcgaagaggactatgaccgcatcccgctgcaaaccgtcaacggcgtcaccatcgcgtatctctcctacaccgagcacaccaacggcatccgccagaacaagaatatgacggccaatatcatctacaccagccagaccgatgtgatcgagcggcaggtgcgtttggcacgccagcaggcggattttgtagtggttggggttcactggggtgtagaggacagccacgccatcgtggacagccagcgcacactggcgcaacagctggcagactggggtgcggatgtcattgtgggcacccaccctcatgtgctgcaggatgcccagtggcttaccgcagcagatgggcggcggagttttgcggcctactcgctgggcaattttctcagcacccagagccgcccggatcagctggtgggcgctatcctgactttgcagctgcaaaagaccacacagccgaacggctcagtgcaatgtgcagtgcttgcgccgcagctgcaccccaccgtgacacattacgatgcaggaaaagccaatgtgcgcacctatcttttgcgcgattacacacaggaattggcggcagcacatggtgtacgggcaaaatattctgatttcagccttgacaggatacaaaaaatcgcgcaaaataatatcagcgcatcctttttgtcgcaagacaagaattagtgtaacataaaagcggcgtatttgtgctatgcaatgcagcgctgttgcattaaaagttgaattgcgatagtgtacttacataaaaatgtgaaatgattgagcgttgcccggtagcccgggcagaacggaggactttttatgtacggagtatcgaagatcaatatcgagactgacctgatgatgatcagcgtgcaggacgtggcgttccggggcaacagtctgtcccgctatctggatatctttgcagagaccggcgtggtagtggacatgatcagccaaagcgccccacatggcactaccattgatttcagctttaccgcatccagcagcgatctgccactggtgatgaaagcaatctcggcggcaaatctggataaggacgccaaggcttctcctctgatcagcgtgggctactccaagctgaatctgttcggcgaggatatggtcaccagctgcggcgtggctgcgcgggcgctgaacgcactggctatggctggtatcgaggtattgctgatcaccaccagcgatctggatatctctctgctcgtccacgctgaaaacgaggacgctgcctatgaagcgctgaaaaaggcgtacgagctgtaacagcaataggccggagggggcagttgcgtttccggttcgatttgcaggccatcagcggctgttacgcgctaaaatgtaaaaatggtccagaaacgcctacagacgtttctggaccatttttaataatgcttttttacagcgttaccttgtggtagatctttttacccttcttgatcacgatacccttggccagctgctctgcggtaaagctgacagtgggagcagcgaccttttcgccgtctgccagcacaccgccctgcaccaccagacggcgtgcttcgccgttggaagcagccagaccggccttgaccatcagggtcaggatgccgatagcgccgtccgtcaggtcagcctcggtcagctgggtgctgggcatatgctcggtatccatcgcgttgccgctgaacagtgcacgggcagcattctgagccttttcggcctcctccttgccatgcaccatgctggtcatctcgtaagcaaggatctctttggcttcgttcaggcgctgatcctgccaagtgctcatctcttcgatctgctccagcggcaggaaggtgagcatccgaatgcacttcatcacatcggcatcgcccacgttgcgccagtactggtagaactcgaagggactggtcttgttgggatccagccagacagcgttgccggcggttttgcccatcttcttgccctgagagtcggtcagcagggtcacagtcatggcataggcgtccttgcccagcttgcggcgaatcagctcggtgccgcccagcatattgctccactggtcgtcgccgccgaactgcatattgcagccgtagtgctggaacatgtagtagaagtcgtagctctgcatgatcatgtagttgaactccaagaaggacaggcccttctccatgcgctgcttgtagcattcggcgcgcagcatattgttcacggagaagcaggcgcctacctcgcgcagcagctcaacgtagttcagatccagcagccagtcggcgttgttcaccatcagagccttgccatcggagaaatcaatgaacttctccatctgctttttaaagcaggcggcattgtgggcgatatcgtccttggtcagcatcttgcgcatatcggtgcggccagaggggtcaccgatcatggtagtgccgccgccaatcagggcgatgggcttgttgccagccagctgcaggcgcttcatcagggtcagtgccagaaaatggccggcggtcaggctgtcggcagtgcagtcaaagccgatgtaaaaggtagccttgccattgttgatcaaatcgatgatctcttcatccgtaatctgcgctaccagaccacgagctttcagttcttcgtacagcgtcatgggaaaaacctcctgtttttggggcagaggaaacaaaaacgccctctgccaaaaataaatttggcagagggcgagataacttcgcggtaccacctctgtttgccgtttcctcacagaaacggccttacgagtgcacaccccagagtagagtgacactcctgcgtctttaacgctcgcacgcggcacagcctactagccttacgcattcagcctgcagctccgggaggtatttcccctgctgttctgtgatcccttgcaccaaccgggacttctctggacagaacgcttcagggtacttgttcccttcatcgccattaacagtatctactctatcacaagaccgccgccttgtcaagagctgtctttttctgcataaatgcattcctatgaatcaaccgctgtgcttgcgctcctgcagcatttcccgtgcattggcgcgggaaagttcggtgacatggtcgccggagatgagacgcgccaaggcttctacgcggccattttcgtccagcggatggatctcggtataggtgcgctcgttggacacgtttttctggatgagcagatgacaatcggccagcgctgcgatttgcgccgtatgggtgatgcacaggatctgatgtccctgtgcgctctggcgcagcacctcaccgatgcgtcccgccgccttgccggacacgccgctgtcgatctcatcatagatcacggttggcacagcgtccttatcggccattgcgttcttgatggcaagggtgatacggctcagctcgccgccggacgcgattttagccagcggcttaggcgcttccccggggtttgttgagatgtagaattcaacgctgtcctgcccgtggctggccagcggaccgcgggtgtgccgcaaggtcatgcgcacgcccggcatattcaaaaagtccagcgtgccggaaatgcgggtgttcaattcctcaaaggctttcagccgggtctgggtcagcacctctgcttttccccgcgcttttgcgtaaagacgcaatttttccgcctgcaaggcatcatagcgctgctgggaatgctggatgctatccagctcctcccgggccttctgcccgaaagcgatcacatcctccaccgtgctgccgtacttgcgcttcagccggtacaaaagatccagccgctgctccacctcgtccagctctgcatcgttggtgtcgtaggcatccagccgcccgatcagatctgcggccacgtccttggcattataatataagtccagcaactgcccagcggcggctgtaagcgcagggtccaactgcgcagcggcatccactgcgttagaggtttcccccagcaaatccaccgcacctgcagcgtcatcactgccggatagcagcgcatagctttgtgccagacgatcccggatggcagatgcattggacagcaccttccggcggttttccagcgtctgctcctcaccggcagtcagtccggcatcctcaatttcctgcacctgatattgcagcagatcgatcttgcgctgcttttcagcttcgtcggtgatcagagcatccagctcccgcttgacctgcaccagtttccggtacaaggtatagtactcctgaaaaacagtgcgattctgcgcataatcatccagaatccccagatggtgcgccggattgagcagacctacggaatcgtgctgaccgttgatgttgatcagaccgccgcacagatcccgcagaacagctgcggtagccggcattccgttgatgcggcagctgcttttaccctcagcggtgatctcgcggctgagcagcagtgcttcggagcgctcatagccggactgctccagcttatccagcacagcagacggcacctgttcaaaggcggcgcggatcaccgcctttgaagccccggtacgcaccaagtctttagaggtgcggttgccaaggatcgcattgatggaatcgatcaggatggatttgcccgcaccggtctcgccggtcagtacgttcagccccggttcaaagtgcacctctgccttctggatcacggcaacattttcaatttgcaggctgctcagcatggcttcgttctcctaccgtcatctctgtcccacataacgggtcagctccgaacaaatggtcttggcatcgcgctcagagcgcgcaacgattaaaaaggtgtcatcaccggaaagggtgccaacaacgtttttccactgcaaagcgtcaaaaacctcgcaggcggcattggccatgccggaatagcattttaccagcacaacgtgcccggcataatccacctccagaacagactcgtggaagatggtctcaaagcgcccttgggtcttggggttgaagctttcgttccggctggaaacatagcgatagccctcagtagtagctgcctttacaaggcacagctcccggatatcgcgggaaacggtggcctgcgtcacctcaaagccctcgttccgcaggtgctccagcagcacctcctgtcggctgatgggatgctcctgcaccagacgcaggatcgtctgcaagcgttccgcttttgtttttgtatcttctttgcggctgcgtgccatcttaaaaatcgcctcccgtgttattgtcttttacgcagtttctggtcaatggcctgaaactggtctgcccgcccaaaagtgataagcttgacgttctgatcagacaggcggatctctgcggtggcacccgccttgaggggatagcccacaccaccgtcacagctgataaacacttcatcatctgccacctgtcccacacagacattcagcttgcgctcctgcgcaaacaccatggccggactggccagactgtgagggcagataggggtcactacaacgcccttggtctgcgagtccagaatcgggccgccggctgccagcgagtaggccgtagagccggtgggggtcgccacaatgacgccgtcgccccggtagtgctctaccagaatatcatcgcagtaaatgctgaagtcgatggcctgctgcaagcgccccttggtcaccaccacatcgttgagggcatgaccttcccagccatcctgaccaagcacccgggcatataaaagcatccggttgtccagctgaaacgcgccacgtgccacggcggccaactttgtttccatttcgccgatctcgcaggtggccagaaaaccgcagcgtcccagattgatgccgaggatgggctttgcgtaccggagcgaaagatttgcttcgtgcaggatggtgccatccccgccgatggtcaggatcacatccgtgcgttccaggcactgctccagcggcagataaacgacccctgccgtgctgcagctttcccgcagagcatcgctcatcagcacagcggcaccgtgggtcagcaggatctgcgccgcacgtagcgcgatctcgcttgcggaggtcttgcccggattgggcgaaatgtagatcgtcataccggcttctcctttgctgacggctgagcctcatcgatccagtgtggtatggcttgccgccaccacctgtgcggcagcttcatcatccagcactgcgggctgatcgctcttctgcacaaacatcaggtactcgatattcccctccggccccttgaccgggctgtaatccagcccgcgcaccacaaagccgttttctgcagcataagacatggcattgtgcagtacctcacgatgcaccgcggggtcgcgtaccacgccgtttttgcccaccttctcccggcctgcctcaaactgcggcttcaccagacagacacccatagcgtccggggttgtgatgcgctgcgccaccgggaagatgtgatgaagagaaataaaggaaacatccacactgaaaaactcaatgggctctgccagatcctccggcgtgacatagcggatgttcgtgcgttccatgtttaccacgcgttcatccgtccgcaggctccatgccagctgaccgtagccaacatccacggcatacaccttcactgcgccattttgcagcatacagtcggtaaagccgccggtggacgcaccgatgtccatgcacactttgccgtcaggggtaagcgggaagcacttcatagccttttccagcttcaggccgccgcggctgacatagccgatatcgtggccacgcacctcgacaactgcgtcctccttgatcatctcgccggccttgtccactttttgctggttgacaaaaaccacaccggccatgatcaaagctttggcgcgctcccggctctgcacaagtccgttctgcacaagatattggtccaaccgaattttcacagctcgttttctcctttcgtgagggctgcccggactgcctgcacaatatccgcagcatccagaccggtgcattgcttgatctgcgggacggttgcatggggcaggcaggctgtgcggacagcacagtgcaaaaagcggccattccagccgttttgctgcaaagcgtaagccagatgctcaccgatcccgccggcagcaacgcactcctctgcaaacagcacgattttatatttcgacacagcatcgataagtttatctgcaaagggatatagctttacaagcttcaggacatccgaattttgcgatgcagcgttcaattggtcggcagcctccagcagatcctccagctcgtctgcatagctgaccagaaggatctctgccccggatagctgctgcaaaaagtcgtactcctgctttgtgcagggatactgcgccagctttgtgttctcgccgccgcgggggtagcggatggcacgagggccggagatcgtatcctgcagcagatagtgcagccagtattgcagttcttcgtagttggatggtgcatagaccgggatgttaagctggctgaggaaggctgcatcgtagatgccctgatgggtctcgccgtctgcgggaacaaagcccgcacggtcaatggcaaagagcacattttcctttagcagattgacatcatggatgatctggtcataggagcgctgcaggaaggtggagtagatgcacaccaccggcagcattccctgactggcaaggcctgccgcaaaagtaacagcgtgctgctctgccatacccacatcaaaaaagcgctgcgggtggcggtgagcaaagaactgcagtccggtgccgtacttcatggcagcagtgatcgcacagagcttcgggttttgtgttccctcctgcaccagcagcttaccgaaaactgtggagaaggactccttcggcgcaacctccgggtccggcattccatccgggtcaaaggcagatacaccgtgatagttgcccgggttcatctctgccggctgatagcccttgccctttttggtcacaacgtgcaaaaagtgcggacccggccgctggtagatcgagcgcagagtgcgctccagctcttccacattatggccgtctaccgggccgatgtactcaaagcccatatcctcaaacatggtggagtggtacatagcgcggcgcaccagtgtttttgcgcccatcagcgattttttcatcggcgggccgatcaatggcacaccgtccagaaagctgcgcacattgtccttggcgtcgtaataggccgtagtcgtgcgcagatgggtcaaataccgcgccagcgcacctacatttttggagatggacatcttgttatcattcaggatcacaagcagattgtccagcccgccgatgttgttcatgccctcgtacaccatgccgccggtaaaggcgccatcaccaatcagtgccaccacaagtccgggctcatgcttgatcttttttgcccatgccatgccaatggccagcgaaagtgctgtattgccatgtccggcaataaaggcatcgtgcacactttcgttggggtttgggaagccggaaatgccatccagctgccgcaaatggtcaaactgcttccggcgtccggtaagcagcttgtgggtgtagcactgatgtcccacatcaaatacgatcttatccttcggcgtttccagcactcggtgcagtgccacggtcagctctacagtgccaagattagaggccagatgtccaccggtcttggagatattctccagcataaaatgccgtatctccgcgcaaagcttctccacctgctgtgcattcagctttttaagatcgctgggctgatcgatcttgtccagcaacgattccatattcacacgtcctttatgcgtttgttctttcgctttttctaccgcagccattctgcgctgctctgtcgcaaatacaaagcagcttctgcagaaggccgcatttcatcacacgactgggaacaaaaagcccaccagcgagccgagcagcacacctgccacgacctgcagcggcgtgtggccgaccatttccttcagatgcatattctgcaaaaagggagcgtttttctcgctcacatcgatccactgggcgatcatctggttcagcacctttgcctgctcgccggtctcgtgccggacgcccatagcatcgtgcatggtgataatagccaccacgcaggccaccgcaaaaatgggcgaggagaccccagcgctgcgcccggtaacaatggccatagcacagacggtcgcactgtgtgcgctgggcataccgccatcgccccacatccgctccagctgaaacttgcccagcagaataaagttgatgatcgtctttaatacctgtgcaacgaaccaactgagaagcgatgcggtcaagatctgattggccgataagatgttttgaataagctgcatatctgtattcctttttctttagtttttgcgcaccagaagctgctgtgccagctgctgcaggaaagccgcctttgcaccaaaatgctgctgcagatcactacagatctgctcgttcagcttttgcgccagcgccattgcaccgtccactccgtacagagtgacaaaggtggtcttaccgttttcactgtcgctgccaatgggcttgcccagctgctctggagtgctggtaacatccagcacatcgtccacgatctggaacaccagtcccagcccgtatgcgtaggatgccagtatctcacactgctgcggtgctgcaccggccgtagcagcgcccatctggacggcggcgttgatcagcgcaccggtcttgttgcgatggataaggcgcagctgttcctcggtggctgccagcgcttcgtatttcagatccagctcctgtccgtagaccatgccgcagctgccggcacctgcgcccagcgcacgggcggctgctacgcagatctgcggtgcagcgggcgcattggcgatcacctcaaaggcctcggtcagcagcacatcaccggcaagcattgccgttgactcgctgaaggctttgtggcaggaagggcgtcccctgcgcagatcatcgttgtccatgcagggcagatcgtcgtggatcagcgagtagcaatgcagcatctccacggctgctgcaaactgtgcagctgcctgcatctcgccgcccagcatatcgcagacgctgagcgtcagaattgcgcggatgcgctttccgccgcccagcagactatagcgggctgctctgcacacctccgattcctcgggcagaaaacgggcactggcagcatccagtgcagccgtagcctgcagcagatattcctgatattgcgccttgtattccattattcttcctcctgctcctgtggtgcttctacggtctgtgcgagccttgcattgatctcctcgatctgcagcgatgttttttccagtgtcgcgtggcagtactgcatcagggtagcagcttccgcatacagcttgacggaatctgccagcgaggtatcctcctgctgcatctgcgcaaggatcgcgttcagccgatccattccttcttcaaagcttttgggtgctctcattgatctcctccaccgtttctacacggcatcgtgcctgatattgccggctgcgcacgcagatggtctgctccggctgcagctgctccatggtgcagaccttgccttttgcatcggtcaccagagcatagccgcgagccagcacacggtacggatccagtgatgacgccagtgcagccgcgtgctgcagctgcacgtttttatcattcatacgcactttttgccgcgtctgaatggtctgttgcatctgctgtagacggcttgaatactgctgtaagattttatctggcgcgttctgctccaacaaaaagttgtattgttccagaccattataacacaacacgagccgtttttgtatatttttgtgaatattttcttcaatattttttaaaatgcgctgttgctcttcccgatccggcactgcaagctctgcggcagcggacggtgtgggtgcacgctggtcggccacgaagtccagaagagtgtagtcgatctcgtgtccgatagcgctgatcagcggcgttttgcagcgaaacgccgcccgggcgatctcctcagcgttgaacacccacaggtcctccctgctgccgccgccccgtgccacaatgatctcgtccacccgcccgctctgatccagtgtgtggatggcggcagcgatctgccgggcggcttcaaagccctgcaccgttaccgggcacagcagcagccggacagacggccagcggcggctgatcacgttgcggatatcctgcagcgccgccccggttttactggtgacgacaccaatacatttggggtacgcaggcagcggctttttatgtgcggggtcgaacagaccttccttttccaaccgagccttcagctgttccagcgcaagctgtgccgcgcccagaccgtccgggaacatttcgttcacatagacctgaaacgcgccgtcccgctcgtaaagggtagcacggcagcgcaccaccacccgcatcccttcctctgggcgaaacgccatacggcgggcatcggtgcgaaacatcactgcttttacgctgcaggcttcgtcccgcagagaaaaatagcagtgtccgctgcgggcgttctgcacaaagtttgcgatctcgccgcgcagggcaagatcaaacagaccgtcgttgacgtccagaagcgttttgacataatggttcagctctgataccgagatcacatcagccatagcccggcctcccgcgcagcaagaatggatacgccgatggcgttatcgctggaatactgccccggcacaaaatagacctgcggcagacgctgctgcacccatgtgcggatgatatcgctgctcatcacgccgccggcacagaccaccggcaaaccggggtattccttctgcgcagctttcgtcatgcggacaacagtatccgccacacagagcaggcagtacttgcagacgtattccggtgcttttccggcagcaagcagggcgttgcattggttttccagcccggaaaggctgcattgcagcccctttacgctggattttgggcggatctcctcggtgcactgcgcagcaaggcgcgagacctcggcacctgcggggaagccaaagcccagtcgtacgcctacgcggtccaccgcctgaccggcgtacagatcggtactggtgccaagggtggtgatggtacgcacctgatcgcacagcaaaagatccgtggtgccgccggagatatggaacaacagcaccttctgggagaacagcgcctcgccctttgcggcatacagcgccgccgcagcgtgtccctgctgatgggtggtgtagatcagcggaatgtcccgcgccgccgcaaaggcagttgcggcgctgacaccagccagaaaacagggcatatagctgccctccaccgggcgcggcttttgcgaaacgcctacggcatctatttttgtcaggtcgaattcctgcgccaattcctgcagcatctccggcagagctgccgtatgatggaacagcgcatcgctctgccgcaggccaagctgtccggcttttaccggcaaaaagcgcttttttgcgcaaacaacctccccggctgtatcaaaaactgccagagaggttgcatagttgcttgtatcgaccccgagcgtataacggctcactgttcagccgactccgcgacggcttcatcactcaggccgtggtcgcgtgccacagcacccagcaggccattcacaaactggtagtcctcgcccgcgccgtacttcttggtcagctccacagcctcattgatggcaacgccgggcttgttctcgccgccgaacagcatctcggccacagccagacgtagcacggtcaggctgacgcggggcagacgctccatggtccagttacgcagatgggcacggatctcgtcatccacctctgcggaatgatcatagtaggcattcagcagcagacggctgaatgcatccacaggatgctcttcatcgttctcggcatggttggacagtgcctcggcaagaggaatgtcaccaaaggtctgcgaaaacgccagcaaaaaggcgttttcacgggcttctctacggggcagaatattttccataatgttcctttcgcaatacaaaccctccccgccgggcgtgccgggaggaggatcgtttctgatatgattttttgctgaatttgttactgcgcttcggtaaggcctgcaatgaccagatccacgcggctgaccgtcacattggtcatgttctgtacagcagacttgacgttctcctgtaccttttcagccacagagggaatccgtgcgccgaactgcatcatcaggtgcagggtgatgctggctgtgccgtcccgcatctccaccaccacaggcggctggatgctggcagattccagcaggcttttcagctttttgttctgcacgccgcaggatacctcggcaacgccatccacttccagtgcggcgcagcgggcgatcttacccacgacctcggtcgaaatctgaaggctgccgccctgaagatccatgttctgtaaatccattgtgctgtcctccatccaaaggctgctccggcggcggtctcaaattgttggaaccggtctgccgtgcccgccttttgtgttcaaacgcgcccttgtgcggtgcataaaggcacgcagcattcatttttgatagagttattataccatcaatgcgggggcaatttcaatacttgtttggaaaagaagatggaaatcagcacggaatggcatcccggcagcgcatacagctttctgcctgcaagaaaaactgcacctgcgccgccggggtgtccgcataaatagagtgtgcttactttacctccaccaccgtgatattctgggcggtcacgctgcttttgttcatcactacatcccggatctgcgccacctgtgccgccgtgagcggctcgcctgccgtcatcacggtcaggtctgcccgccctgcttgtaaaaagcacaggcaatccgcaaagcccttggcgcgcaccagtgtctcgatctcattttctgcgttcagatcttccagccctgccgccatttgtgcggtgtactcctttttctcctccgctgtcagggaggaggacttcagactcttttgcagggtgtccatggcttcatcgtgtgccttttcccgcttgagacgggcctgttcaaaaaagcgggtgccgctgtcgtttgcaacgctgacaagctgtgcttcgccgtagtttttgctggcaccggagaccgcttctgcttctgtgggcagcgcatccgtgatggtggtctcggcatctgcttccaccggctctgccgagaccatgagggtgtcgtcctctgtctgcggggtgatgtccgcccgggcatactgccagtttaagtagacggcaatgaccagtgccgccgccagtgtcagggcggtgaccctgcgggtgtttctggaaagtgctctcataaaacgcttcctcctttgggttttcggtaaaactatttcggtacttgatcaaagcagcggctcagcgcttgcgctgttccacacagatgcggttcgtgggcagatccagcagcgaatgcagcagctcggtgatgcgggctgcaatgcggacatctcccccgccctcacacagcacggcgaccccgcagacctgcggcagataggttgtctcggcaagcgcagagccatcctgcaaaagaacatgggtctcctgctgctgcagctccccggtctgggtgtccaccgcatagacggtctcctctccagtggtcagggtgaccatgaccgtggtgcgccccgctccctgcaattgactgataagcccttccagctgctgctccagctgggtctgatactggctgacggtggctgtttgggcggtggatgccgccgctttctgcgtatcgccaccgggtaaaagttccgacagcaaaagcagcagcattgccagcacaccgacagccaccgccagcgaagtgcggcccttgctgctttgcagagagcgaaaaacggaaagcaattcgtttttcttcatggtgtgctctcctccgctgccgttggagcacccagcgtctgctgcaaaaagctgagcgctgcctgcttttgggcggcggtgcagcccgccgggaaagcagcaacagccttttttaccacgacctgctgcccggctttttccagtgtgactgtcacacgaatatccagcccgaactgttgacggcactgtacggcgcaatactcctccagccgggctttggtctgggtcaagatctccgtttccagtgcatccggctgtgcagtggatgtggccgccggggctgtattgcccgaaaaagcggccgcgaccctgcccggcaggtgcggcaactgcgcaagaaggactgctaaaatatatagcccggctacggcttttatgcaccggccagcccagccttgtccgccaaaaagactgaccagctccgccccgatgcacgccatgcagaacactgccgcagcccgctgaaacgcctgcatctaaccaccccctgtcagcatcagcagcacgatgcccaccacaaacaacatgaaaaacaaggccgtgactgccgccatgcagcgcgcggcttcagcaaagcattgcagcagcttatggcaatgctccagcccgccgatcccggcaagccagctgcagcaggacagaaaaaacagatgcaccagcagcccgagatacaagggcgcaaactctgccccgatgctgagcaatgcggcaataccaagggtgcttttgagcagctgcatcccggccagcactgcgtctgccgcgctgctcagcgcctgccccacgatgggcacgctgccggtcagcagctgtcccagacgggaggctgaacgatccaactgcaccgttaccacgcgctgaatactcatcagggcagcgaatgctttgcccgcccagccgatagcctgccgcagcagccgcccggtcagggtgcagccctcggacaggcttttgcgggagctgatgccgcaggccatgctgatggcaaggtagctgcgcagcagcggctgcagccagagagtgaccgcctgtgcgataaaacacagcaccgtgagcagaaagccgtttgcagccgctccggcgttccactccccgccagccgccagtacgccgctatataccggcaaaaagcccagcagatagcttttccacccggccatccgggtacacagcgcggcggcaagcttgtccagttcctgccacaataaaacgccacagccaccggcagcagccagttccagcagtgctttgtcggcagtgtcctgcaagagaaatgccagcccggctgcaagcgataaaaaaagcagaatagcggcatattgttgcagcgcatcccgcagcaattgcaccggctcggcggcaaacaaacgcagcagggtgcccaacgggtctgccgcaaactgctcggcctgcacaggtgctttttcgagataagtctgccacggtgcgacttctgcagccgcagctttcagagcagttttgctgcacagaatgctcagtattaccacgcaaatgataaggctgcgttttttcatcccaccagcccccagatcgtctggaatatctgttccagcagcggccatactgccgccagtacaagacaccgccccgccagcccggcgcaccatgcaagggcatccgctccggcttcctcgcagagagtacggacgtaatctgccagcagcaaaatcccagcgctgcgcaaaaggcaggaaaatgcttgcgcattggtgcgctgccccagctgcacgaatgcttgcagtaccccgcgcagcggctgtgccagacggagcagcagccacaccgcagcacccagcgaaagcagcagtgtaaacgccggggagtaccgctgcaatagaatgcctgcaaaggctgccagcaacagcgccgtcagtaccggaactgccgcgctcatagcgcaaacaaagaccggatggtagcaaacagggtactgatctgcttgacgagaatggagagcaccactacaagcccggccagcgtggtcatcatggcctgatcctcccgcccggagcggatgagcagctgattgagcaccgcgactatgatgccgatggccgcaattttaaacacaagctcgatatccatccgtttctcctttgtcccatacagcctttacaaaaagagcagcgccagcatcatgccgcctgccagtcccagacggtgcggcagaccggcctgctgctgtgctgcgcggcgtgcctgctgcaaatagtcctcgaaccgcgccgtatagtaatccagccgttcgcattcctgcgcggtctctgcacgaccaagaccaccgaaacattctgtgaagcaggcgcgttctgtcgccgaaagctgccccggtgcaggcagctgctgcaatgtaccatcgtgagtttgcgctaacaccccctcgcggcaaagctgccggtagaggctttgcaggtctgcccggcggtactgtatctcctgccggatgcgctgcaataacgcgatggtgcgctgcaaggcggcaagatgcagggtagttttggcttgtactgcgtcccccgccagccagccgcacagcgggagcaaaagcagactaaacccgcgcagaaggctgctcatacggcacgcacctcccggatgcagcccggcgtctcccgcccggcaaggacgaccagctgccgcagcatcccgcgttgcagcagggtctgcacctgtgggcggcactgcgcctgtgcggcatccggcgcatggatgctggcaataaagtccaccccgctgaaaaagccttgttccagtgctctggtctcttccaagccgcccagctcgtccagcaagatcacttgcggtgccagcgtgcgcagcgccatctggacggcacgggctttatccaccccgccgatgcgctccagcggcggcaggggctgctccggcgggaaaagctcaccccgctcgtccaccactgccaccagacgctgccgctcggccagcgtccgggcgatggtgcgcagcagggtggtcttgccgctgccgggctctcccactatcagcaacccggtaaagtgctgttccaacagcttgtccagctcgggcggcaggcagatggcgcagttgcgtgcgattcgcaggttgagcgaggtgaccttttgcagcgcaatgctctgcccttcccgctgcacgaactgtcccgctacgcccacacggttgccggcggcagtggtcaggtagccctcggcaagctccctttcatgggtgtgtaccgagccgttgcaaagggtgtagaagatctcctctatctgcagcgcatccagccgcatggcagccaatgccggtggacaaccaggcaaaactgaagcagcgcattgccgtccttgtacggtaaacgtgaccgcacagcctatacgcagccgcagctcctgcacgcgcactgccgtttgtgcaggcagctgtgccagcggtgctgccagccaagcgggaagggctttgacagcccggtaatactcgtccactttggtttctccttccacgaaagctttgtgctagcattgtatgcgctttgcgcgttcttagaactgggaacaatcaaacaaaaaagcccctgcaacagcgttgcagaagcttttgaaattatttgtattttgacattcggaaggtcactttaagtcgtttcctgttctgcctgggcatcttgcagcatggcaaggaactcctgctcggtcagcaccggcacgcccagcgcctgcgccttggtcagcttggagcccgccgccgcaccagccaccacataggccgtttttttggagacagagccgctggctttgccgccgtttttcacgatcaatgcttcggcttcgttgcgggagagggtctccagcgtaccagtgaccaccagcgttttgcctgccagcttgtcccccttcggctcgcccttccactgcatattgaccccggcatctgccaagcggtgcacaaggtcggtggtgccttccttagcaaagaattccaccacgctctgcgccatcacgccgccaaaaccgtcgatttggctgatctgctctgcggtggcttcccggatggcttgcagcgtgccgaaatgttctgccagcagcgcggctgccttatcgccaatgttgcggatgccaaagccgaacaaaagcttatccagattgttctgcttggaagccgtaatggcctgtaacaagttgtccgcgcttttctccttgaatttgtccagttccagcagctgttcccgggtcagcgtgtagatatccgctgcggaatgcaccagttccttttccaccaactgggtggcaaccgcctcgcccaagccatcgatatccatggcgtcccgggaggcaaaatggatgatattgcgcagcgcctgtgccgggcactccgggttcacacagcgcagggcggcttcgtcctccagatgcaccaccggcgcaccgcaggaggggcagaccgtgggcatggtgtagggttcagcgtcctccgcatgatgggtgaccccgatgacctccgggatgatatcgcccgccttacgcacccgaatggtatccccgatgcacagcccgaactgccggatgaagtcctcgttgtggagggtggcgcgggctaccgtggtgcctgccagaaataccgggtcaaagcaggcggtgggggtgagcacgccggtgcgtcccacagctacctcgatgctgcgcagggtggtctccttgacctccggcgggtacttgaaggcgatggcccagcgcgggaatttgttggtagaacccatcaactcccgctgggcaaaatcgttcaccttgataaccgcaccgtccatgtcaaaatccagcttggcacggttctggccgatattctcgatttcggcaatggcgtcctcgatatcgtgcactacatggtagcgcggcgacacgggcagaccaaggctcttgaggtaatccagactttcggagtgcttggtcagggtcttgccacggatctgctgcacattgaacacaaagatggaaagtccccggctgccggtgatacgggcatccttctgccgcagagaaccggccgctgcattgcgggggtttttgaagggtgcagcgccctgcaattcctgctcggcgcacaggtgctgaaaggcctcatggggcatatacacctcgccgcgcacctccagaaactccggtgcatctttaagggtcttggggatgctgcggatggcacgcacgtttgcggtaacatcctcgcccaccacgccgtcaccgcgggtagaggcgcggacaagctgcccattctcgtactccaagctgcaggaaagaccatcgatcttaatttccacaacatattccggctctaccccggcttcgcggacacggcggtcaaagtcccgcagctcatcaaaggaaaacgcatccagcaggctttccatcttaacggcatgggtcaccttggacagcttgctactggcagtgccgcccaccttctgggtaggtgatgctgctgtgatcaactgaggaaactgcgcttccagctccttcagctcccgcgtcagggcatcgtattcaaaatcttccaactccggcgcatcctgatcgtagtaaagccggttgtttttctcaatcattgcgcgcagctcttccacgcgctttttagcctgttccagttccaagtactccactctcccgcgatatgattttattttctgcctgctgtgctcaatgcaatctaccgagcgcagatcgacccgggcagaaaacattctgattctataaactgtacttcagtataccacatccatggatggtctgcaaagtgtaaaatacaaatcgtatttttgagtgttctcatgcattgaaatcgatatcagtgcagggtttgcgttgattttaaatcatctgtcgaagatactaatcgtatattactcatattttgcagcgataatacgtcttattttataagttttctttccaatctttttagcaactcttcgcattgctttttctgcgctggcacgaacaaaaacacccctccccagcgcggcagctcgtaccgtccgggaaaggggtgcgttttttcgattatttacagccttacgttcaggtgaccgggatcagcagccgctgtgcctgcggcaggctggtaagctcttcctccagctggtttgccgcaaggatctgcgccggggctacatggaaccgccgggccaccgcaaatacctcctcccccgcctgcgcgtagtagatgcgcaaggcgatctcggggtcggtgtcgggcagcgggtcaccaagggcgatgctgccgatgaccgggcttgtggcacagcctaagatcgtgccctctgcccggactgtaatcgttgcttccagcgtaccgcccgcacaggtgcattgcacgttctcggtgctgagccagcattccggcacaagcacagttccttccggcggtgtgatgggcagcgggatattgacctccaaggttttctcgtagctttccagctcgccgagggtattttctgcaagggctgttaccactgctttggcggtaagcacccagccctcccctttttggacggtctgctgcggaccgtagtgcacaaagcaggcccgcagctgcgcccctgcatccggcagtgggccggagcctgtggcggtggcggtatcgttcagggtgcagagcagctgctccgtgacaagcggctgcgatgtgagctccgtttcaaaccgggtggaaaaagcatccaccgccacctgcagctgatagctgcgccatgcccgcaggtgcagcatgacgtttgccgtcagctgggcagcggcgctttctgcctgcgacagggtaaaccccaccggctctgccacacataagcaatggcagtcctcggtgatgccctctagatctatcacctgctggaagggcagcgccgccgcctgactttgcagggcagtatccccttctgcccgccacgcgcactgcacccgcaactcccccttaaccacagccttgccggcaagcagctttacctcccctacacaggcgttgccggtaatgtccagtacagccgccgggggctttgcaaagacaagctcgccctccaaggtgaccagcttatccagcacggccacgctgcgcacgccttgcagtgtgcgcagctgctgctcgataccgccatctgccagcgccgtaatgacctcggtcttgcactgtgtgtgtaccgtgaccaccagcccataggcacctcgcacctcgatgcggcgcgggtctgccgcgcgggtgttgaggtactctgtctgcccttccaccacggctgtccatgcggtaaaagccagctccggcagttccagctgccgggtgaagggcagcttttgctcggtctggcacaagcctttttccgcttcgctctggtaaagcactgtgcatcgcagatagccctctaaggtaagcctgcccggctgcagctgccgctgcagcaccaccgggtggacaaagcactttaccagcttacccaccggcggcaaatcgtccgaaatgcggatctcggtctccagcggaagttctgcttttatggtacagcccgccccgccctgcggcagcgtgtcccggaatatcttcagttccatgtgcagtgtgctcctttccctgtccgtttccgtaagagtgtatgcggcagcagacgatggtatgccgacagcaaaagaccggtgtgcagcagctgccacacaccggtcttttatagattcagttctctttgcggatgccgaacagcttgcgcagaatgccgcacagcgctttcgggctgcgaatgaccactacctgcatctccaccccgcctttcgctcatgtttaccccattatagcgtctgacaggcaaaaatgttccgggaatggttcaatccgcgatggtctccaccaccaccagcgcgccctgccgggtgctgatggtgatgcagcttgaaccttcggcgtactcgttgctcacacccagcggatagcctgctgtgagtacggcatcctccagctcatagaaggagcctttttcgtacacaccctcggcgcgcccctccatggggaaggccgagaagtagaaaaactcctccttggggtagcagcggctctcgcccggcagcacaaaggtgatgcgggagcgctcgtcctgcaaggcggcgcgaatgccgcgctgctcaagcccaaggccggtgcacaggttggcaagggtgtgctctacccgcctgccgcccagtgcacccagcaaaagcacctcgtcaaagcccttctgtgcagcaagctttgcggcatattcggtatcggtgtcgtccttgacgtggggaagaacaacgatatcgtccgtatcctgctgcgggcagggagcggaatcaaagtcgcctacaatgatatccggcttgcagcccagccgcacacagttgcggtagcccgcatcgcaggcaatgataaaatcatcgctgcgcagcaggcgcttgagctccggctgcaccgggcaggcggaaaggatcacacaacgggacattttattcttccttccgttattacactttcgggcgctgccagtccttgacatcctttacctcgtcgtacatggcgcagtagctgtcgtaccgggtcttggaaagtttgccctctgccagcgctgcccgcacagcacagcctttttcgctgcggtgggagcagccggtaaactggcactgacccagataagggccaaattccgggaaggcgtgctccagattctccttggggatgaacccggcgcggttggcttccagactggcaaagcccggggtgtcggcaatgcgtccgccgtaggcttcaaagatggtcacctcacgggtggtgtgtcggccgcgtcccagcttctggctgatggcgctggtctcgcgggcagcgtccggcagcagtgcattcagcagggtggattttcccacgccggagttgccgcagaaagcgcacagcctgccgttgatccactgttttacttcgtccagccctgcgccgccttcgtagtcgatgcggataaacggcagagtggactttgcataggcgtttgccagaaaatctgcttcggcaaggtcgcttttggtgcacaccaccaccggctgtacgcccttatccaccgcaatggcggaaagcttatccagcaccaaggtgctgggggtgggctgggtagtgcttgccacaagaaacagcacatccagatttgccaccggcgggcgcacaaaaacgtttttacggggggcgatctgtgcaatgaccgccgcaccgttttcggtctccagcgttacctcatctccagccacaggggtgatcttctgcttgcggaagatgccgcggggcttgcactccacgataccatccggcgtttttacatagtaaaagccgccaatgccttttacgatataaccgttcatgcatatcctccgtcagcccagcagcgaggaccaccagtccagaataccgccgcctgtggagctactgctggagctcggctcgctgctgccgccggtgctctcgccgccggtagagccttcaccagtagtgccggaagtaccgtcactgcccggctgctccggttcctgcgccggtgcagcgcctgcgctgaccacaacgtttacgcggctgttcagcttcgcggtggtacctgctgcagggttctggctgagcaccgtgcctgcgggctggtcgctgtattcttcgctctggctgccaagacccagatggttctgcaccagcagggtgcgggcatcatccacgctcatgccggtaagggagggcactttggtggtggtggacacctgcggacggctgatataaaggatgaccgtggagcctgctgccacctgcgtaccggcggcagggtcggtgcggatgaccgcaccggaggccaccgaggtatccacagcctgcgtgaccagcaccgaaacgcccagtgccttgagctgctgctctgcatcggactgcacatagttggtcagatccggcacggtgacatactgagtgcccagactgacggtcagcgtcacgctctgaccctcgcggacggtgcggccggacaccggcgactgcttatagatataaccggcggcatagttgctgttatactcttcttcccactccggggagatctggccggatgcgatctgatccgtggccatggcctgatccttggtcatgccgatatagtccccaagggtgacatcggccttgttgttcatcaggttagaggagtcgttcaggatcatccagcacagcgccatgcaggccagtgcaaaggcaatagtgatgccaaacagggcaggcaaaaagacggtgcggcgttttttgccctgcttgtttttgccgtttttgcggggagcaggctgttcgttctgacggatcgcgcggttctggttcatggtacgtttcaccaccttttcgggtgcttcttctgtaatatactgatattcaaacagcacggaggggttctgcacataggtgtccagtgcctccagcatcgcccgtgccgaggggtaacggttctgggggagcttcgccatagccttttcggtgatctccaccagcgcatagggcacctccggtgccagctcgtgcagtgagcggggctcgtccgagatctgcttgatagcgacctccaccacatcatcggcatcaaagggcagatgaccggaaagcatctcgtacatcatgacgcctaccgagtagatgtcgctggtgcggtcggtctcgtcgcctttggcctgttccgggctgatataatgcacactgcccatcgccttgccggccagcatctggttatctgcccgggaaatgcgggcgatgccgaagtccatcatgcgcagctggccattatccagcagcataatgttctggggcttgatatcccggtgcacgatgccgttggcgtgggcgtgctccagcgccttgaggatctgggagatgaagtgcacagtctcccggctggagagtttgccgccccgctcgttgaggtactcccgcagggtcatgccgtccacatactccatgacaatatattgcagatggtcgttgaccgaaacatcgtacaccttgacgatattagggtggttcagcagggagatggccttggattcgtttttaaagcggcgcacaagatccgggtcgtgcatatattcctgccgcagcaccttgacggccaccacagtcccggcgggcacggggccgttctgtccccgcatgaccgccttatatacatttgccatgccgccggagccgatcagttcctgcacctcgtacaggccgtccagtcttttaccgatcaggttatccatggcgcacctccatcggctccacccctaccagcagggcggtgatgttgtccgggccgccgttttcgttggcggtgcggatcagaacatccggcagatcataaaaagacccgctgcgcagcagctgctccagctgctctgtgggcacggcattggtcaggccatccgtgcatagcagcagaacatcccctgcctgcagcgccacggtggtgaactccggctccagccggtaatccacacccagcgcccgggtgatgatgtttttctgcgggtgatgctctgcctgctcctgcgtgatggtgccgcagtccaccagctcctgcacataggagtggtcgtgggtcaactgcgccagcttaccgtcccggtacaggtaggcgcgggaatcgcccgcgtggctcagataggccttgccgccacgcaccagagcgcagacagcagtggtgcccataccggccagagactcctcccgcagcgccttctggaacacatagcggttggcgctgagcagcgccttctttaaaaaggtctcctcttcgccggggatgcactggctgtactgctcctgaaagcagcgctcgatgacgctgcacgcacactgcgaggcttcccgcccgccgcgtgcgccgcccatgccatcgcacaccagcgcccaggctgcatcgccgggcagctccccggcacggtagtcatcctgattgtcctgccggacgcgtcctacatccgtttttcctgcaagtttcataggtttctccctctatttatgccttgccgttcatttcgtcgcggcgtagctggccgcaggcggcactgatctcgctgccaaggcggcggcgcaccgtggcgtttacgccaaggctttcaagcttttgctggaaccggcgcacattggctgcatccgtagcggagtacggactgccgtccaccgggttgatggggatcagatttacatgagcacccatgccccggatcaggtctgccagctgctttgcgcagatatcagaatcattgacaccgcgcaccatggaatattcaaagctgacccggcggccggtggtctcctgataccggcgcacggtctggatcagctgctccaccgggtaggcatcgttgaccggcatcatgctgctgcggatctggttggtgggtgcgtgcagcgagatggaaagggtaagctgcagctttttctccgccagctggtcgatcttaggcacaaggccgcaggtggaaaggctgatgttgcgcatcccgatattgacgccctcgggcgaggtgatgttctccaaaaagcgcatcacctcgtcaaagttatccagcggctcgccgatacccataagcacgatatgcgagatgcgctcgccgatatccttctgggcagtgtagatctcggagcagatctcgcctgcttcaaggttacgcacccgccccgcctgcgtggaagcgcagaaccggcagcccatgcggcagcccacctgcgtggacacgcacacggtattgccgtagtggtaacgcatgacaacagtctcgatgcagttgccgtctgccatgcgcagcagatacttcacagtaccgtccttagcttcctgacggcgttcgatctgcggtgcagcgatataaaaggtttcttccagctttgccagcagggtcttgggctggtcggtcatggcagaaaactcggtgaccagtttctggtgcacccagtggaagatctgctttgcccggaaacccggctgtcccagcgctttcagttcagcagtcaattctgccagcgtcagggaagaaatacagcgtttttgttccattctgttctcctataagaggatacgacccacaaaggtcgtgcttattgcgttgcggcggctttttgcagcacacacaggaaaaaaccgtccatgccggtacgggtgggcaccgaaaggcagccgtgctcccctgccgtcatcccggcgggcagcggtacatccggcgcgcagaccgcaaattccgggtgacgctgcaaaaaggctgcaatttgctgctgattttctgccggatcgatggtgcaggtggagtagaccagccgcccgcccgccttgagcagcgccgcagcggtatccagaattgccgcctgtgtggcaagcagctctgcctgccgggcagcttccagctttttatagcgcagatccggcttttttgccagaatgcccaagccgctgcaaggcacatccgtcaggatgcggtctgccatgggcagtgcagggttcggcttggtggcatcgttgcacagggtgtgcaccccggcaaagcccatgcgatccacagcggtgcggatcagccctacacggttttctgccgcatcacagctgtacagttctcctgtgccctgcatctgctcggccagcagaatggtcttgccgccgggggcagcgcacaggtccagtaccgtctcaccgggggctgcacccacgcaaagagctgccagctgactggcctgcccctccacatggtagtacccctgccggaacagctcgttgtctgccgggctgcccgcaaaccgtgccagcacactgccgggcacgatgccctgccgcacctctgctgcgccctgctctgtgagcagcgcacacagctgtgcagcgctggccttaataggatttgcgcgcaggctggtcaacccattatcagcctgatgggtcaggatgcccagtgcttcatccgggtagtttttgtggaggaattccgccacatcccgcccggcagagccaagcaccatcaggcgctggatctcgtctgtaaagacggcagcgtctaaatcatagccgcaggccttgcgcagcacagcattgacaaggccggaagcgctggattttttaaaggtgcgggtcagcttgaccgcttcgttcaccgcagcggagacaggcacctgcatatagcgcgcctgtgccagagcggcgcgcagaatctcccgcacgggtgcatccagcttcgccagacccttgggcagaaactgctccagaatatagtccagcgtgccgcggtgctccagcacggtgtagaagatggcgcttgcaaaggccttatcccggccttccagcttctggcgcttgagctctgcgtccagcaccagattggaaaagccgtcctgctcctgccgtatcagtgcggcaactgccgccgcacgcggatttgccgccatcagaggttatcccccgttttcagacgcagacctgctgcaaaggcagtaccgtccataggctttttgccctccggcacgacctccagcagctggatagcaccatcgccgcaggctatggtcaggggctttgtagcaagcacagtgccgggagcttcaccgttggcggcagccacgcggcaggacatcaccttaagttttttgccgccggaagtgatgaaccacgcacccggccagggattcatgccgcgcacccagttatggatatgggcggcagagtctgtaaggtggaactctgccatctccttgttcagcatgggggcaagggtggcgttttcgtggtcttgcggcacagccgtcagggtacctgcggcgatctggggaatagtctcgcacagagcttcggcgcccacagcggtaacgcggtcaaacaattcgccgctggtctcctcggggtcaatggcgatttttttacagtacagtacatcgccggtatccagcccttcgtccatctgcatgatggaaacgccggtctcggcgtcaccgttcagcaccgaccactgcaccggggcgctgccgcgatacttcggcagcagcgaaacgtgcaggttgatgcagccatagcggggcatttccagcacggacttcggcaggatgcagccataggccaccaccacgatcagctccggggcgagggcacggatgttttcatcctcgctgccgtcccgcagggtgcggggctggaacacaggtgtgccgtgcgccagagcaacctccttgaccggcggcgcggtgagcacctgcttgcggccgaccggcttatcccgccgggtgtacacggcacagatatcgtgcccggcggcatatagggctttcaggcactcggcggcaatatccggcgtgcccatgaacaaaatgcgcatcagttgtttcctttcgcttcgcgggcagcctttttgccttcctcggtatcctcatagaagtactcgctggactccatgatggtgatgccgtccagatggtcgttctcgtgctggatgcagcggcccagcaggccgtcagcttccagctcgaaccattcgccgttgcgatcctgcgcacgcaccttgacggcaacggggcgggtcacagcgccgttgtgtcccgggaaggacaggcagccctcgtaggcagtctcctcttcctcggaaacggcgaggatctcggggttgacaaaatcaatgaacttgtactcgtaatcctcggggatctcctccggggcatcggtggtgtcccacaccacgaacaggcggcgcatcatgcccacctgcggaccggccagacctacgccgtcggcggcgatcatggtctcgcgcatatcgtccagcagagtagccagacggtcgtcaaaattggtcacagggcggcagaccttgttcaggatggggtcgccttcttttacaatattacggatagccataatggtacctccagttttatcagatgtcaccgtccgaatgcagatctaccacgaccgatgccttggacggcagtttttctttttcatacagtgccagtgcagcacgcacaaggtcgcggaagcggcggtcgttgcggcacttaacggtaagcttatagcggtaggtgtcgttgatcttttcaatgctgccgggcgtagggcccagaatgcgcaggggcagatccggctgcttggccgcctgctgccctaaaagcgccgagaaacgggcagcggcacgcgccacctcgttctcctttgcaccggcaaagccgatgacgcacagcccacagaagggcgggtacaagcccagcctgcggtagtcgatctcctgctcatagaaagcatcgtaatcctgtgcggcggcaagggtgagcaccgggttgtccgggtcggtggtctggatgatggcaaagccgggctcttttgcacggccgctgcgtcccaccacctgcgtgatcaggctgaacacgttctcgtatgcccggaaaccctgtgcaaacagcagcgaatcaatgcccagaacgcccacaagggtcacatcctcgaagtccagcccctttgccaccatctgggtgcccaccatgatgtcatattcatgcgctgcaaatttggcaagcagcttttcgtgggcgtccttggcggcagtggagtcctgatccatgcgcagcacccgcgcctccgggaagagctttaccagctcctcctcagccttttgggtgccgaaaccccggtactgcagcttgccgccgcaggccgggcaaagggtgggcggcggctcctgctgggaaccgcagtagtggcacagcaccttatgcgctgatttgtggtacaccatgggcacgctgcacttggggcacttgagcacctcgcggcagtcctcgcactgggcaatggtctggtagccccggcggttgagcagaaggattgtctgcttttccgcgtccagattgcggcggatggcatcttccagcgcaaggctgatctcgcggggattgcccgcagccagttctgcccgcatatccacgatctgcacactgggcagcgggttgccgccgtaacgcttggtcagacgcaccagctgggtgcggccattctgcgcagcgtaaaagctctcggtgctgggggtggcgctggccagaagcagcagtgcgccgttttcggcggcacgctgccgggcgacctcgtgggcagagtagcgcggtgcggattccgaccggtaggtgtgctcctgctcctcatcaatgatgataaggccgatgttttccaacggcgaaaacacagcgctgcgggtgccgaccacgatatctgcgccgccgtcctgaatcatctgccattgcagcaggcgttcggtgtggttgagtgcggagtgctgcaccgccacgcggcggccgaactgcccttttaaccgcaggatcatctgcggggtcaggctgatctccggcaccagcaccagtgccttgcggccaagctccagacagcgggcaatcagctttaaaaacaccagcgtcttgccgctgccggtaacgccgtacagcaacgccgaatggggcgcggcatcttctaacttgggcagcagcgtatcgtaagcggcctgttgctgctccgtgagggtgatggggtcgttgcgcagcggaatggaggcgtacaggtcgatggacttgttcaccttgctgcattccagcacacctttggtgcacaggttatccagcaccgcgcggctgatgcccttatcctccagctcgttcaaggtgcggggaccgccgctcagcaatgccaccgctgccagctgctttgccgtaggctttggcttttgcggcagcgtgcctaccagcttgtaggcgttttcggtgtggcgggtaagctgcttttgcagtaccggggtcacaccgtctgccgccacggcgggcttgtactgtgcaccatacggaataactgccttgacggcctcgtaataggtgcagaaggtgcgctcctttaaaaaatgcaccagccgcaacaactccgatgtcagacaggccgaggccggggctacatcgaacagatatttcagcttggagtgctccggctcggcatcgcaggccagcaccacgcccatgcgggcgcggctgcccttgccaaagggcaccagcaccatgctgcccagacgcaccgcattctggtgctccggcagaacggcgtaggtgtacagcttatcaaaatggaaggtcgcattgctgacggcaacacctaccgttttgggcattcgtccaactccttcaacgcttgatttttagccttgcagcccggcgcgctggcagatgacctgatacagctctgcggcgcagggctcgatctggttgttgaccagctttacggtaaacttatcctgctcagccagctcctgccgggcggtggcaagacgttcctgaatgctttcctcggtctcagtgccgcggccgcgcagacggtgctccaactcctccacagagggcggcagcagaaacacggtggtagcgcccgggaacatccggcggatattggcagcaccgtgcacatcgatgaccagcacgaccaccttgccggcttccagccgcttttccacctcagacttcagggtgccatagtagttgccgttatagaagttgtgctccaccacctgatcgttttccagcagctgctgaaactgctcccgggtgcggtagtagtagtccacgccctcctgctcgccggggcgcggggtgcgggtagtggcagagacggtcttttcaatctcggggtgtgcctcgcgcagtgccttgaccacgctgtccttgccggtaccggctgcgccggaaactacaaacagaaatttatcattcgccatgagatgcttcttcctccattgatgctctgccctcctgcccggcggcgcggcttgccaccgtttcgggctgaagggcggacagcacgacatgatcggagtccatgatgagcacagcccgggtgctgcggccataagaggcatcgatcagcatcccacgctcgcgtgcttccttcaccagacgcttgaccggtgcagagtccgggctgacgactgccaccacgcgccccgcactgaccatattgccaaagccgatgttgatgagtttcataggctcctccacaacatattattccagattctggatctgctcgcggatcttttcgatctccgctttcatatccaccacgatgcgtgtgatatccagatcctgacacttggagccaatggtgttggtctcgcggttcagctcctgcgtcaggaaatccagcttgcggcccacgggctcgtccagctgcaggatatcgcggtactgcgcaatgtggctgcgcagacggacagtctcctcatccacggcggtcttatcgccaaagatggcagcctcggtcagcacacgggcatcatcgatatcacgatcctgcaggatgaccttgagtttttcgtacaggcggttggtgtagttctctacccggcctgcactcaaagcttccaccttgccgacgcactgttccagaaacgcaaggcggctttccacgtctgccttcatcttggcaccctcggcggcgcgcatctccacaaagcgatccagcgcctgcgcggtgacggcagacacatcctgccacagctgttcctcgtccacatcggcgtggcgggtggtcagcacatccgggaaacgggtcagaacggcggtggacacatcatttttgacccccagctgctcagacaaggcccgcatcgcctgctgatagctgcgggcaagttccatattgacggcgaccacggtatccgctgcgtccacgttctgcacggtcatgctaagctccaccttgccgcgggagatccgctggttgagctgctttttcaggcggctgtccagagaactgcaggtgcgcgggatgcgggaggaatactcgaaatagcgggagttcacgctgcgcagctccacagtgatctcacggccattgagcacggcagtccccctgccgaaaccggtcatgcttaagatcatactagctcctattcttttgcggtttaacttcgttttttctgtataggtatccgctttgggcacacaagcccatgttacgatacatatagcatcattttactattcttttctgaaaaattcaaggtgcagactgcatcctcgcaaaaaacacgatttccattttttactgctgtgcatccgtccgcagtcaaaacaacatggctgcggcagttaccgctttttagaagctccccccctgaaaaattataaccccgcgttttcacgcagggtcataacatcagttcgtcttataaacgcaggtcacgctggtttgcaggatatctgcgttgagcagcgtgcgctccacccaatggatgttgtcggcaatggtatccagagagacctcgtattccttggcaatgctttccatcgtgcggtattcgtagcgatagatcaaggtcagaataagcttatccatcatggagatcttggtaaagcgggtcttacgtttgtgctcctgacggtaagcctcctgcagagccttgagcatccggtcaaattccagttttgaaatgccaaaataccgttgatagtcctgctcctgaaactcagcaatgcgctgttccgggatgcttcgcatagcattttcctccacatcatttattgtattgccgggatcatttctttcattataaaatgtattgggcagcaagtcaatgtgtatgcagaagtttttccggcattgcccggcgcagcctgttttgtgcctttgccggatatacaaaaagggctgccgcacagctttttgtgcagcagccctgaaagaaacttatttatcagacaggatgagactggttggtgtaatccacatgctcaccgtccacgccctgctttttggcattgcgcttatcgaagaacttgggtgcgacctgcgggaacatggcgtaggtcagcacgtcttcttcctgcgttgcccacttggcagcttcggccttcagcttgtccatttcgggagcaagcgtgtcggcaaagcggcaggtgatgggctgctcgtcaccaaggatcttcttggtgaactcgggcttgatgggagcgggagtcttgccgtagtcgccgtggaccagacccttgaactccttggtgaccatcttgtagcgctcgcccatgatgacgttgaacacagcctgcgtgccaacgatctggctggtgggggtgaccagcggcggataacctgcatcctcacggacgcgggggatctcggccagcacttcgtccagcttatcctccttgccggcatccttcagctgcttgagcatgttggagaacataccgcccggcacctgatacagcagcgtgttggcgtccacgcccaggctcttggggctgatctggccgttggcgatgtacttctcgcgcagctttgcaaaataagcgcgcacgacattcagctgcttcagatccagaccggtgtcgtagtcggtgccctgcagggcagccaccagactctcagtgggcatatggctggtgccaaggctcagggggctcatagcggtatcgacgatgtcggcacctgcttcgatgcccttgaggatggacatggaagccagacctgcagtgtagtggctgtggatatccacagggatgctgacggtctccttcagcttcctgaccagatcatagcaggtatagggggtgagcagaccggccatatccttgatgcagatagagtttgcacccatctcctccagagtcttggcgtaggatgcaaagtactcgttgttgtgcacggggctcagggtgtagctgatgcagccctgcacatgagcgccttccttgttggcagacttgatggcggtctgcaggttgcggggatcattcagagcgtcgaagatgcggataacgtcgatgccgttggcaacagatttctgtacaaagtactccacagcgtcatctgcgtagggacggtagcccagcatattctggccgcggaacagcatctgcagcttctggtgcggcagctccttgcgcaggatgcgcaggcgctcccaaggatcctcgtccaggaagcggatgcagctgtcgaacgtagcgccgccccagcactccacagagaagtagttgatcttgtccatttcgggcaggatggggcgcatctcgtccatggtcatacgggtggccagcaaagactggtgcgcatcacgcaggacgacctcggtcaccttgatcggcttttttgccatggttgtcacctcttccttagttcatggaaaccagaacgtcaccggagttgacggtatcgcccttgttcacgttgatggaagccacggtgccatcctgcggagcaacgatctcgttctccatcttcatggcctcgaggatgaccagcacgtcgccggccttgacagaagcaccggcagcgaccttgacgtccagaatgttgccgggcatgggagccttgacggcaactgcaccggcggcaccggcggctgccttgggagcagctgcgggagcgggagcggccttgggtgcggcgggtgctgcaacgggagcagcagcaacaggagcagcgcctgcggcagtttcctcaacggaaacgctgtaagcaataccattgacagtaatattgtagtacttcatggaaggatcctccaattcaaaatcgaactcaattaacttacattcggacgcttacagagccatattgccatgcttcttgggcaggcgggcggcacgcttggtgctcagcagctccagtgcagccacaacgctggcacgcacattggcggcatcgcagctcatatcggcagcaccggcggccactgcgctggcagcgctgcacacctcagcggtgtaggcagcagccttggccttggtggcggcaatgatgttgtcggaagcatcgatctcgtccttgtacagcacgctgacagcggcgctgggctccagtgcgctgacggtgcagccggtcacagcgatgcgcaggtcggcagcagccagagcggtgtacacaggacccacagccttgccggccagcacagccacctttgcggtggtagcatcggcataggtagcggccagacgggcagcttcacggatgccgccggccacgtcatcggtaacgctgggcacaaagccctcggtgtccacgatggtgaccacaggcacgctgaaagcatcgcacaagcgcacaaagcgggaagccttggctacgcagttgtggcacagctgcttgccggttgccacaacgcccacggcgttgccgccgatggttgcaaatgcagtgtagacagacttaccaaagcctgcgtacagctccacagcgctgtccttatcgatcacagcggcagcagcctttgcgggctcggcaccggcagccagaacagcggtgggctgctcgaactcgaagatcgccgggccggtcaggttgttggcgggcagcagacccacgatgtgagcggccttttcagcagcctctgcggcatcggcagccacgatggaagccacacctgccttggcggcagcggcggcgctgcctgcatcggcaaccttatcgcccttagcagcggaggtgaacggagcggtgaagaacagctctgcaccctcggccataatgcagacgtctgcgttggcagcgctcagagcgctggtgccgccgcagacgcccagaacaacggccacctgcggaacaacgccggagacctttgcgatctgtgcattcagctttgcgctggcggtcagcacatccagaccctcggccagctttgcaccaaccgagttatagaaggtgaccaccgggcagccggtctgtgcagccatttccagaaccttgatgttcttttcaacatcctttacggtaacagcctcgccgttctgataaacggcgtaagcctgctgacctgcggcataaccgcaggcagcgctcactgcaccatcagcaaacagcgcagtatactccccgtcatcgaagaacttggcgaggatttctcccttattgatctttgaagccataattagacctcctggttgtctgtgtgagctttcaaaattatatttattatacagaagctggcaaaaaaatgcaagggattctataaaaatccatgtgattcaacatccatcgcttatggaaagccaaatttttaacgattcatcgttttgcgcgttttacctgggcaactgctatcgcacgccctttttgcggatgtagaaatttttccgatttttttggcgaaactgcacccgcctgccgcgttttctttccgttgcgtttatgttacactatattatagcaattcaactttttaatgcaacagcaacagcgttgaattgcatatcgcaaatatgctgtttggatgttgtactaatttcttgacttgcgataaaatattaaaaaatcataattgccgggcagtttgccaaactgtacctatgcagtgcacgagaaaagcccggtaaaaatgaaaaaagaggttgaagctatcttgaagcgattttccgcaaagctccggcagcaggagcaggcctaccgctctctgcacgatgccgcccgttccctgctttcgccaaaggggcgggtatttctgctttttctattgttttataaggtactgacaaacctcttgttcgtaccggcgttgcagctgatctgggcactgacgctgcggttcgcgcccatccgctacctcaacaataagaccgcttcccgcatctttgcctcccctgccattatcgggtgcatcgccatgctggcggtgctggcagccttctggaacctgtacgaggtcgccacgatgctgcatctgctgacacggatacggcacggggagccgctgcgggcggtagcagtgttccgggatgccttttgcagccttgtgcgggtgtttctgccgcagaatctcccactgctgctgtatggcgctgccctgatcccgctgacgaacttttttctggctgcaaaccatctgacccagtttgccgtgccggaatatctctgggggctgctgaaggcgcgttcctccaatcgttttctatttgctctggcggtgctttttgtgctggcactgctgctggacgggcttgtggttctgccaaaatttctgctggagcgcaaaagttttggctgtgcgttcgcggagagcctgcgggttttgcgcagccgtgccgggcagctgcttgcgctggcactgcgctggatgctgaccgccgcagtgcgcaccgggctgatgctgctgtgcggggcagcgctgttctattgcgtcatcctaggtgtcggctttgccagcactgctgccctgctggcgctttcccgcgcggcgctgctgatcgagttaccgttcctttgcctgcttatggactgtgccatgacggcggcgcagagcacccttacagaggtactgtacgaagcgccccggcagtccgatgcagcgcagccgaccatttccggtgtgctccctgccctgcaccgtgagcagacggtgctggccgggatgatggcctgcgccgcactggtcacctgcggcgtagcggcggtatacctgctgttcccgcaaacgcagccgctgcaaagcgtgctgggccttgccgacccggtgatcacctatcaccgtggctattcttcccgtgcgccggagaacaccatggctgccttcgaggccgcgctggagcacggcagcccccgcattgagctggacgtgcagatgaccgccgatggcgtggccgtggtgacccacgacaccagcctgcgccggtgtaccggctgcaacgccaacatctacgatatgccttatgcgcaggtgcagcagctggatgccggacgctggttccatcggcagttcacgggttcctatattcccacgctggaagaggttctggcgctgtgcaagggcaaggcagaactgaacatcgagatcaagcccagcacctttacgccgacattggaagccgaaacggtacggctgattcacgcatacgactacggttcagactgcgtggtcacctcccagagctacgagaccctgtgcaaggtgaaggaactggacccggacattaccaccgggtatattctggcgctgggcgtaggcacctactacgatctgcctgccgcagactttttcagcgtagaatccacctttatcaccgccggtatggtgcagcagatccatctgcgcggcaagaccatctccgcatggaccatcaaccgtcagcaggatgccgaaaagctgctgcagctgggcgtggatgacctgatcactgacaaacccgagatcattgcgccgctgctggcacgggacaaggctttggataaccgtctgctctggctgcgggatcagattcaggagttgtttgccgccccggacgctgaagaagcgatggaggttgaggagactatcgaggacgccattgaggatcccgaagaggttttggacgaagcataagcagaagatttatacagcaataccgggcagtctgcgggctgcccggtatttgccttttcacaaacaaaaggagccgcagcaccctgttagaggtactgcggctcctattttgtctttggaagtttaaattacttcaccatgcttgcaacttcagatgcgaagtcatcagcacgcttctccagaccctcgcccttgacaaagcgggcgaacttgacgatcttgatctcgccgcccagatccttagcgaccttagcggtgtactgagcaacggtcaggtcgccgtccttgacgaactcctgatcgaccaagcagttctccttgaagaacttcttgatcttgccctcgatcatcttctccttcacagcctcaggcttgttagcggtcttgggatcctgagccatctgagccagcatgatctccttctccttagccacgacctcggcggggacagaagcctcgtcgacgtagccggggttagcagcagcgacctgcatggcgatgtccttgccgtaagcaacgaactcgtccttagcatcgatgtcgttggtggtctcgaagttgaccagaatgccgtgagtgccgccgccgtggacgtatgcagagcagacgccctcgtaacgggtgaagcggcgaaccttgatgttctccttgatgaccaggatcaggttcttcagagcctcgtcaacggtctcacctgcctcggtcttgcaagccatcagagcctcgacatcagcggggttctgcttcatgatgaccttggtggcctccttgacgaagtcgacgaacttgtcgttcttggcaacgaagtcggtctcagcgttgacctcgatgacaacaccgaccttgcaggcggggcagtagtcagcgtagaccatgccctcggcagcaacgcggcttgccttcttggcggcggtagccagaccacgctcgcgcaggatctcgattgccttctcgaagttgccgtcagcctcggtcagagccttcttgcactccatcatgccgcagtcggtctgcttgcgcagttccataacgtcctttgcagaaatagccattttttgttttctcccttacacgttatttgattggttgcggaatgggaaatcaggcgtttgctgcgtcctcggcgggagcggcctcctggttgccctgcttgccttccagcacagcgtcagccatagcgccggcgatcagcttgacagcgcggatagcgtcgtcattgccggggatcacgtagtcgatctcatcggggttgcagttggtatcaacgatagcaacgatggggatgttcagcttgcgagcctcggcaacagcgatgcgctccttgtgaggatcaacgatgaacatagccttcggcagggtcttcatgttcttgacgccgcccaggtacttgtccagcttctccatctccagctccagcttagccacttccttcttgggcagcagctcgaaggtgccgttctccttcatcttagccagctgatccatacggtcgatgcgcttacggatggtgcggaagttggtcatcatgccgcccagccagcgagcgttgacatagtgcataccgcagcgcagagcctcgtcacggatggactcctgagcctgcttcttggtgccaacgaacaggatgtcgccgccctcagctgcaacttccttcacgtagttgtaagcctcgtccagcttcttcacggtcttctgcaggtcaatgatatagataccattgcgctcggtgaagatgtacttagccatcttggggttccagcggcgggtctggtgaccgaagtgcacacctgcctcgagaagctgcttcatagaaacgactgccataataaaatacctccagatattgttttgcctccgcacaccgtgatctgcacagtacatcgggtaccggcggactgccctcaacccaaaagggcacaaaagggcatagtgatgcgtgtgtaatgctttgttataatagcacaaaaagaatgcggttgcaagtggttttctctgttttgtataaagaaatgctcactttttctcttatttgcccgtattcatcccgcttaagcccgcaacgcccatgcggttgagggcatatcccttgccgaacatcaggtcgtattgcagcatccagtgctcgtttgtccagcgctgctggaactccgtgggctgctgggtggtggtgccgtccagattcatggtggtgccgcgagtgcagctgcggctggcaacccgcagctgccggttgaggaactggaagtacagcggctgctccagcccgaacagctccatcatcaccggggagatatcgtaggcggcaatggtgccaaagtccacctgctgctggctgtaattcgaccacatcagcagcgtggtttggtgcaggcgggggtcggtgctggagccgctcgcgtagccggtagtggtgtagacatcgtagttggaatcgatggggttataatggtcgccccagaacaccagaataaccggctcgtccacctgagaaaaatacgccgtcagcttgcccagcatggcgtctgcatcccggatgccggtagcgaaatcttccagcgcacccacggtgctgctcttgagccccaccggatgggatacgacgtgcacccgctcgtcatccgggtagttgtctctattataattggtatggttctgcatggtgaccgcgtgcaggaagatgggcttatcagaggaagtgctcatcttttcgtactgctgaatgatctggtcggccatggagtcatcggtcacaaggccgctggtccagtagtgcttgcgcaccttggtcacgccgtgcatatcttccagactgataaaatcactgaaaccgaggttagggtacgccttatcgcggctccagtattttgcccagaagcagtgcaccgcagcggtctgatagcccttgagtttgaggtaattgggcagggcgaacatgggctttgtgacgtgctgctggtagggcttgctgccgctgggcaggaaggacaccgagtagccggtcagggcttcaaattccacatcacaggtgccgccgccaaagctggggctgtaggctctgccgtaggcgctggtctgctgcagagcatgaagattctgcgatacatcggtatcaaaggtgatgccgtactgctctaactccgaaacatcccagtaggactcgtccatcacataaataatggtaggctgctttgcctgctcctccttgggggtggtggcggcatagctgcctgcatacatggggccggtggagaatttctcactctcggccacgttatccagaatatcgtccactgcctgctccgagtagccctcgggcttgtcgatctccagattggtgaggttggtcataaaaccggtaagtacaccgtagtaacgatagtagcggtcctgcatccacgcatccggcgtgatgcccaaaacctgcgtgactgcgggctgtaagtaaacgccgaagatcagcagacacagcgccgccaccgaagcaccggtgcccgcaagccttggcagccagcgctgacgcagccgcccacggtaaacaaagaagcttgccactgtaagcgccagcaccagcacaatggagaccaccatgctggtctgcagcttgagcccggcagcagaggccacaccggcagcctcggacacctgcatcagatcccacggcagaaagggctcaccccgcagctgcatggtatagaagtttaccgcgcagggcgcacagcccagaacagccatacccagcgtggcaagcggcgggatgcgcagcacccagtccagcagttcccacaccagaaacagcagcagccatgccagcaggtatgccccgaaatggggaaaaataaagctgataaaggtatcagcggtcagcgacccacgcgcgatccactcgcccagcagcagcacgataagagaaactgccgccgggaagagcatccgcagggtcaacagcggtttggatgttttcatagtcgatatccctttccacgtcccgaaccctatttccagagtggctgtgctatttgcacaagcctttcgtgcttattatagtcactttgctgaaaatgtccattcatgattttacaaaaattacggttttatttttcaaaatattcccctatttttcacagacccagctttgcacgcagctgctgccagaagccgtgcggtgctgccggtgcttttggcacggcggtatgcaccagaatggcatccgtgccaatggtctcaatctccctccaagggatggtcagactctcgtcccgacccagcagaccaaaaaatcgtggcctgcccagtaagatcaggctttgcagctgcgccgttgcggggtcaagttccagatcatccgcgcggccaaggcacaccccctgctccagctgaacgacctctttctcgcacagttcccggatcgtcacggcactctcccctttctgccacagcatacgccggggcagcattttctatgccaaaggggtggaaagcacccgcccggttgtggtatactatggaaaatatctgagaaaaacatccaatacaagcgaggcagcagttatgtataaaagcattatttttgatatcggcggtgtgctggtggattttgaccccaaggcataccttgtagaccggctgtgcaacgccgagatggaggagaaggtctacgatttgacctttggcagcgaggagtggcagctgctggacgcgggcaagctttcccgctatgacggcaaccagcgtatgctggagcacgcccgcgccgagggctgcgcctttgaggtgcagggcgtgctggacgactggatgcacattctgcgcccgcgtctgcggatgctggagctggtgcggcggctgaagagccacggctattgcgtgtattacctgagcaatatcccgcaggatgtgctggaattgctgatcgaacgcggcgtgctggctcagtttgacggcggtgtagcctcctgtgaggtacaggtgaacaagcccgacccgcagatctacaaagctctgctgaagaagtatcagctgaaggccagcgagtgcgtatttatcgacgacaggctggaaaacgtgcaggccgcctttgcgctgggctttgccggtatccagatgaaggacagcgtcggtacgctgatccgcagccttgccacctgtaacgtgacgctgcgctgagcattgataccgtaaaacgcagcagcccctgccggaaagatctttccggcaggggctgctttgcgttggtaggaacttacttttcctcgtagctctggcagtagtgcggggtctccacctgctgggtggtgcagctgcactgctccgtcaccttgatctgcggcagatcacatttgcagccgtccacattgtggcagcacgcgcagacatcacaggtcacgccgatgttttccatgcttatcacctctttgtccataggttgccctgtggagcaagggtttatacatggattttatccgtttgccttttttgcttcccgcttggacttgagcgtgaccgccacgtgcctgatagacaacaccggatgcaccggcagcatacgcgggccagcccagcgcatgactgcacgaattttctcccgcatttccggcttatagcaatggaccttgcaggcggaacagaaggtctttgtttccataaacggacacttttcaatgcgcgcaagcgcataatcgtgcagctgccggcactccgggcataaagtgcctttgggagtgtcatgctgtttgcggcagtagagtgcgatcatctcgctgacaagcagtttttcatctgcacgctttttatccaagtttttgtgggtctgctgcatcgggtccgttcctcctgatcgttcttattctcttttacggcctgaccggcgcgcagcacggcgtactgcactgcgcaaaaacgcaaagcctactgtaacgccaagtgccacagccatttccatatacaccgcctttacgattatcaaaaacggcaggggctgccggacagtttgtccgctttcccctgccgtaaattctgcatttttacgatactctgcataacggctgctgcatttctaaaagttagcgatttctaacttttgtttctataaaaatgccgaaacacggcaatttatagtttagcgcagcaaaccatttttgtcaagagagtttccctctcgtaaagctcaccatgccgccagatctgcgcccagcttacggcaggcagcctgcacgtcatcatcaggcgtttcgttgcagatgaggccttcctcgctgaacagctgtgcgccatcatcctgtgcgcgctgtacccagtcgcgcatccactgaccgtcaccccagccgtaggagccgaacagtgcgatctttttgccgttcagagagccttccagtgcagcaaacatgggctcgaactcgctctcttccagctgctctgcacccatagccgggcagccaaaggccaccacgtcaaactctgccagctttgcgggggtcatctcaccacagggcacgagggtgccgttggcacctgcgccttcggcgatgcagtttgccatggtctcggtgttgccggttgcactccaaaatacgattgctactttgctcataaaactctacctctttctttgtgtagttagttttgaataacttcatgttctgtaaaaatgcgtccgtgtttcatgacgcatttttgtagttagtattttctaaccatcaacaggataccacagccctgccccgcttgtcaaggtattggcgcaatgtttgcacggtgcaacaatgccgccttgctcaaaagtgcatgaagcgtgtgtttcagccacctaatacgcggaacgccaccagcagcaccccgtagatgaccggctggtgcagcagatacagcagcagcgagtgccgcccaagccagcctagcggcgggcagaccgagcggtgcaagggttccatgcgctgccgccctacaacgccgtagagaaagtaccccgcccagaacagaaacagccacggcagaagggcaaaataatccgtagaatagaaccaccacgggtaaaagccaaagtacgctgtgacatagtttgcatacagtgtctgcggcagccagagacgcaggctgccaaaacccaaatagcctgccgaagcattgcgggtcagggcgaacagcactgcggagatagcaaaccctgctgcggggggaatgcgccgcagcggcttttccaaaaggccggtcagcagcatagcgctgcccagcagggtcagcacgccaaaaacgaccctgtcctccggcataaaaagcagcgtaactgccgtgacaagcgcccctgccccgaacacctgtgcgccccggcgcagggtatgatgccccagctgcacacagaagccggacaacagaataaacacccagcagatgctctgctgccacagatgcccgggcaagccataataccagtcggcctgaatgccgaacagattgaccagatcccagcagccgtgatagagcatcatgctaactaaatccagcccgcgcagctcgtccagaagggcgtagcgggcagaagcgttatgttgcttcacggcgttttccttcctttttgtcacgctgttacaccgttttgcggcgcagcagactcatgggcggcagctccggggtgggcatggtgtatttttccatggcgtgcggggtgctttccacccgctcccctgcttcgttttcaatccattccggggtaagcgggatactgcgtccgtccgggcacagtgcctccagcgtatccccaaggctccatttgccgcgctgctggcaatgggcgatgccgttttcccagctgtccaccgtgccaacgaactcccactcgcggatgtaggtggcgctgtcggtggcctgtttggcctgctcgcggccgaaatagaagccgggagagtagtgccggtggctggtacgggtaagctctgcgtacacctccggcggcagttcaaaattatcgtttgccgggtcggccagataggcgtccagtgccttgcggtaggcagcggtaacgctggccacatagtagaaggtcttggcgcggccttcgattttcagactgtccacgcccgccttgcagatcaggtcgatgaagggtgcggtgcacagatcgttggcgttaaggatatagctgccgttctcgttttcgccgatctcgtacagctgaccggggcgggtctcctcgctcaggtaatacttccagcggcagggctgggcgcactggccacggttggcgtcacgccctgccatgtagttggacagcaggcaccgaccggacacgctcatgcacatcgcaccgtgcacaaaggcctcgatctccagctccggcggggtcttatcgcgcaggatggcaatatcctgcaaggtcatctcccgcgccagcaccacgcgctttgcgcccattttgtaggcggcgcgggcggctgcccagttggtgatgccggtctgggtggaaagatgcacgtcaatgtccggggcaaaggtcttgcaggcatccagcacaccaaggtctgccacgataaaagcatccacaccggccttggcggcttccttgatggccgccggcaggcggtcggcttcctcgttggtgggcagggtgttcatggtcaggtagatcttgcggccgcgggcatgggcgtagatgacgctttccgccagctgctccggggtgaaattggccggggcagagcgcataccaaactccggcaggccgcagtaaacggcatcggcaccgtagttgatggcataacgcagacgttccgcatcgcccgccggggcaagcagttccgggatctgtagcatttgtaggttcctctcttatgtatcacagtttttaactggaaaggggccgctgcaccgtgttttttgtgcagcggcctttcctcagtttttcaggcttttgttcacagctgcggcagttttgcagtttgcgttatgctctgccagcgtgtgggcgtagtagtaattgcccttgaggtcagtcacaaagaagtaagcgtccttggcttcctcatcgggctgcggctccagcgccgccttgatggcggcaaggccggggttcgagatggggccagcgggcagaccggtgcagctgtaagtgtcgtaggccgcaaggatattttccgggatatcgtcccagccgccgtagtagggcgcgacccagttccagagatagttgttgtcggcgtcgctctggatatggctggaggtgttgctttgcagccgggggtatggcgagccctccgccaaacggttgcggaacacctgcgccacattggagtcctgactgttgcccgcttcctcctgcacaaaggaggaaagagtgacaagctccgacagggtcatgtcctgctttttgagcgctgcgtacatttccttggtaaattgtgcatcgaactgggcgtagaaggtagctacatagttatgcaccgtatcacccttcaaaaactcgtaggtctccgggaaaagatagccctcgcacttcatgaagcggtttggagcatctttatcctccgggacatactgccagaaggtatatgcgctgaaatcgccctcgttggcttccttcaaaaactcctcggcggtgcacagaccagcggcttccatcttctgggcaatagcaatagccgttgtaccctccgggatggtcacccgcaccgtttctgctttggcatactgggaaagggtgctgatgagtgcatcgtaggagctgccagtggtcagctcaaaatcgccgtattgcagctttgcggcagcgcccttttctcccacataccagcggaacaggtaggcagagcggatgacgcccgtctccttcagcttgttggcgatcgtggctacgccgctgccctgctggatgcttacggtgaccgcagtgccggacttactgctgccgtggatctcgctgcgggcaaacagcaccgctgcgcccgcggccagtagaagcagcagaagcaccaccagcagaattttgcctgcaccgccctttttgcgggctgcgtgtgtatcgttgtgtgccatacgcaccttccttttttcagttttccagcatcagacgcagataactttcgctcacgtcaaaaggctctgcgtcaaagcggatcatgccgtattcctgccgggtgccctcgcccagaaacagcggctgggcagcgcctaccgtgatgactgccttttccacgatgacttccttctcgcgggcggcttccatcaggatctcggcggcgcggtcgctgtcggccatcatctccacaaaatacagggtgtcctccttgcggaagtagatgccgtagccatgctcgttggacacgatggtagcgccccgggcgtacagctcctgcagcacaaccgccatgcgctccgggctcagctgcacggtatccttccagaattgctcccgcagctcgcacagctttttggccgtcaccgtgtcaaattccgcctggctccacaggttgcggcttacctcacggggcaggcaacgcagggcaaaagcctttgcaaagcctttatcctgcagcagagcggcctgtgctgcgtctgccgggactgccacggtaaagcctgcgccccgcagcttttgctgggcgcacagggtatccaacagacccgccagcagcagactgccctcgccgcacaggcacaggtaattgcccgtgcgcccctgcagggtgaccggcacagccagcgcagccgccacgatggcgtcgttttcatcggccacataaatgttctgcacaccggcaaaacgttccagtaccatttttgcaaaatcttcggtatcatgatgctggctctgccacaaagccagcactgccgcctcgtcggacggctgcatcagacgatacatcgttcaggatgccccctcttatcgtattttattgttcagcccagtgttttccgggcaagctgctgtacctcttgctggatctcttcaatgctgcgcattgcgtccccgctggtgcagtgcacggtgtcccagccaagatgccgggcgcagaactcggctgcggcgcggctgcgcgccagataagccgtatctttttcgtgcacgtcctttttgctctcgtcgccgtggtagcgctgggtcatcagccgctggctgaccgccgggtctacctgcaaatagatgaccctgtccggtgcgggcagacccagcagccggaactcgtaatcgaacagccagtgcagatattcttcccactgctcctgcggaagcttcgagcactggtgcaccgcgttggaggtggtgtatcgatcggcgatgatcacaccaccctgctcataaaagctgccccagttggttttatagctggcatagcggtccaccgcgtaaaagctggaagccgcgtaggcgtttacatcgtccgggtgctggccgaactgccccgccagatacatcttgaccagtgcgctggaatcgctggcataatccgggaaggtgatcttttgcaccggtacaccctgcgcggcaagatgctctgccagcagctttgcctgggtggccttgccgctgccatccagcccttccagtacgatcagtttgcctttgctcatacgacggcaccttctttaatggcagcatattttgcgcgtacctcagcggtcttgccgcagcacatcttgccctccgggcaggcaccgcacaggcaggcagggccggccttagcaaagatatggggtgctaccgggtacaccagcgcgaacatcttttcagccagttcccggatctcccactgggcgcggttgcagcagcgcagctggaagaagttcatcaggctgcgggcgttcatggtgactaccattttggtctcgcaggcattgggcagcacaaagcgggcgtcctcgttggcctgtttagacgccttggcgcgggcctgcttttccggcattccctcagccatcagacgggcggtgtgcccctcctccagcttatgagcgaggtcaagataacgctgggcgtcctcttccatgctggcaaggaaagcggcttttgcttccgggatggcttcgatctccgggggcgtcacatagcggaaatcatccagacgcacatagcgctggctctgcacgctgaaggacgcgatgcggtgccgggtgatctgggcaagcagggtgcggctgaccccctcgatgccaaaggtgaagctggcgtgctcgatggggcttgcgtgaccaaggtcactgagcatggtcagaaattttgcagttttttcctcgtccaacccgtccagaaggtcggtgatatgggcgtcggagtaacagagctttgcggcagccgccaccactttttccggttccggggtgtgggcgatcaaacgaacagtcatcatagggtcattcttcctccgtaatcttggtcaggggcgcaaaattggccatcgttttcttgatgcccactttttcaaagttgatctccacgatctgatccccggcagcaggctttaccttcagcaccgtgccgcggccgaacaccttgtgctccacgatgtcgcccggttcatagtgctttgcgtcgaaagccaccgattttacggcagaatttgctgtaaaggatgtttgctttacagtatctttcgtcgcatttccgctggaatatccagaaccaaatccgccgcttctggtagtcggctgagcggagctgttgccatagtgactgccaaaaccggaggaaacggtacttcttccgccgtaagaggagccaaagccacggctttcaccggcgttatattcccggttcaggtagccgctgcggttgcccgagctgtaacccgagccataaccgccgccgtagctgctgcggctgtaaccggaggggccggagtagccggatgccccgccgggcacggtatcgctgtaactactgccccaaccgcccatgcgggaacgctgttccagcaccgggctgcgggtctcctcgatatattccggctcgatctcccgcagaaagcggctgggctcgttgcgctgggtgcggccgtacagcatccgggtgacgctgttggagatgtacagctcctttttggcgcgggtgataccgacgtaagccagacggcgctcctcttccagatctgcttcggagtacttgctcatctcgctggggaaaacgccctcctccatgccgatgaggaacacataagggaactccagacccttggcagagtggatggtcatcagtaccacctgatcgctgctttcgttgtagctgtcgatatcactgatgagggcgatatcctccagatagccttccagtgtggcttcctcgccgtgctgatcgcagtagtttttgacgttgttcaccagctggccaaggttctgcagacggtcggcggcatcctcgtgccccttggcggcgtctgcttccagcatggccttgtagccggtcagttcaatgacatcggaagcgaactcatccagcgtgcgggtggcaagagaatcctgcaggcgctggtagatctgccagaacttgagcagcggcatgaccgcgcgggagagcttggcgtactggtcggcatggctgataacatccagcatactgaccccctgctgcccggcaaggtctgcaatgacgtcaacggtagtggcaccgatcttgcgggcgggctcgttgatgatgcggcgcagccgcacatcgtcccgggggttggccacgatggacatataggagtggatgtccttgacctccttgcggtcgttgaagcgctgcccgcccacgatcttatgcgggatacctgcgcgggtgaaatagctttcaatgggggccgactgggcgttcatgcggtagaggatggcgtggtctgccagatgcccgcccgccttcaggtgttgaccaatgacgtccgcgatatggctggcttcatcctgctcgttctcggcggtgtacacctgcaccttatcaccctcgccattatccgtccacagggtcttgcccttgcgctcggtgttgtgctggatgacgcagttggctgcgttgaggatgttggaggtggagcggtagttctgctccagacggatggtcttggtgccggggtagagtttttcaaagttgaggatattttcaatggtagcgccgcggaaacggtagatgctctggtcgtcatcgcccaccacgcagatgttgcgctccggtccggtgagcagactgaccagacggaactgcgccacactggtgtcctgatactcgtccaccagcaggtagcggtacttgttctggtagaactcccgcacgtccgggtagtcggccagcagctgcacggtctgataaatcagatcgtcaaaatcgaacgcaccggcctctttcagctttttctcgtaggctgcgtagatgcgggcggtctgggtgctcttcacgtctctggcgtggtctgcaagcgcctgttccgggctgaccagctgatccttccagcggctcatctggttgatggcggccttgatgggcagaaatttatcatcgatgctcagttctttatacaccgttttcatcacgcgctgggcatcgtcggtgtcgtagatggtaaagctgcgggggtagccgatctcctccgcccagcggcgcaggatgcgcacacaggccgagtggaaggtggaggcaaacacctcgtccccttcctcgctgcccagcatccggcgcaggcgctctttcagttcccctgccgccttgttggtaaaggtaatggccatcacgttccagctgcgcaccgcgttgcggcgcagcatcccgtccagccagctgggggcatcggtaccggtcatgatggcggtgcgcagggctttgacgtcctcctcggtcaccgggcggggcgtttctttggagccgtgcgccgagccgaaccggatgaggttggcaatgcggttgaccagcacggtggtcttgccgctgccggcaccggcaaggatgagcagtgggccatccgtggtaaacacagcctgccgctgcatatcgttcaggcggccgaattgcttttcaatgtaagtatcacgcagggtgcagaattcctgcccgagagatgctgccatggtttcacctgtttccttcgctgttattcataccgtatagtataacacatttcgaaaaggttgtacaccaaaactgcatggagttacaactgcttttccagcagatagcggtcgtagccgccgtacatctcccggcggcagcggatgacgaagccgccggcctgtgcgttgcgcaggctgtagctgttatccgggctgatggtagcgcccagatgggtgatctgcggcggcagcagcggcagggctgcttccagcatggcgcgctgcaggccgttgccccgccagtccgggtgcactaccgcactgtctgcgttcgcccagtgctgccactggctttgcggcacccccagaaaggcggcgtagttttcatcgctctgcccgcacaggcgcaggatgaggtacgcacccagccgccgttgctgccatgcgccgatacatatcccagtgcgcagataagcggtaatattttccagtgtatccggcacgaactgctccgggtgcggcatggcggcgcgcacttcgttttgcagcgcgaacaccgccgatgtctcggcgggggtgcagcgccgcagagtaacagcctgccaggcgggcttgccgcatactttttgcagaaaatagtccatctgtactatgccctccaaaataaaatcgtacttttcagcagattccagtataaatgacgcttttctaaatgtcaaattatgctataataggagagaaggggctgtggaggaatcctccctgcccgtttgtatgaagttcggggcggcttgccgcccggaaacggaggaaccatccatgaaagatcccgcactggcatcgtccagccgcttgggcggcgctgtgatcagcgaccgcgttgttgcaagcctgctggaggagctgtccaacgggcgctatgcccaagccgaccgcctgcccgccgaggtagaccttgccaccgagctgggggtgagccgcaccgtgatccgtgacgcgctgagcgagatggagcgcgccggttatgtggaacgggtgcgcggcattggcacggtggtgaaccgcgctgtactggggctgcgcagccgcttggaccagaagctggagtactaccctttgatccgcagctttggcagctacccccatgccgacggcattcaggtgatgcttcttcgtgcaggcgaggagatggcgcacgcgctggcgctggaagtcggtgacgaggtgatctgcatcaaaaagcgtatccttgccgatacgaccccggtgatctattccatcgactacctgccccgcagcctgttcggcaaccgggactacacccgcatcgacctgaccggcgacatctttgagatcttagagcaggagtgccaccagcagatctcttccaacgtggcgcacctgaaggccagctgcggcgatgaagccatccgcgcagccatgcggcttgccccgggcgaggccatgctgctgctggacgaagtatgtttcaatcgtttgtgcaagccggtgatgcgctcgctgagctactacacgaacttttttgatttttccatcttacgcaaactgctttaaacggaggtatcctatctatgcgtcatctgatcgatcccttggatcttacccagcaggagatcacacagctgcttgatcttgccgaccgtatctgcgccgaccccgccgcctatcaggaggtggccaaccacaaaaagctggctaccttgttctacgagccatccacccgcacccggctgtcctttgaagcggccatgctgaacttaggcggccatgtactgggctttcccagcgagaacgtgtccagcgcctccaagggcgagagcgtagccgacaccatccgggtagtgtcctgctatgccgatatcgttgctatgcgccaccccaaggagggcgcaccgctgcgtgcctcccgctactcccgcattccggtgatcaacgccggtgatggcggccaccagcaccccacccagaccctgaccgacctgatgaccattcgccgccgcatgggcaggctggatgatctgaccattggtctgtgcggcgacctgaaatttggccgcaccgtccactccctgctcaagaccatggcacgctgcaagaacgttcgctttgtgctgatcagcccggaggaactgcgggtgccggattatatcatcaacgacgtgctggaggccaacggcatcccctacaaggagacccgcagtctggaggaatccatgccggagctggacatcctgtatatgacccgcgtgcagaaggagcgcttcttcaacgaggaggactacatccgcctgaagaacagctatgtgctgacccgcgaaaagatggcgcaggccaagcccaccatggcggtgctgcatccactgccccgcgtgaacgagatcgcgctggacgtggacgacgacccgcgcgccgcttattttgaacaggtgcagaacggcgtttacgtccgcatggcactgatcatgaccctgctggggcttgcagaccccaaagcaccgaaggaggagaactgatatgttgaatattgacgagattcagaacggtattgtcatcgaccacatcaaggcaggcactgccgttggtctgatggatctgctgggcattgcgggcaaccgcactgccagcgtggcgctgatccagaacgcccgcagcaaaaagacggccagcggccgcaaggatatcatcaaggtggagggcgacgcttcgtggctgaacctggatgtgctggcttatctggacccgaacatcagcgtgaccattattgaaaacggcaaggctgtccgcaaggagcagcccaagcctcccaagcgtctggtgaacatcgtgcggtgcaagaacccccgctgcatctccagcattgaagaagagtgcgaccagatctttgagctgagttccaacggcaagtaccgctgcatctactgcgagcaggagctgcaggtaaagccggagtaactgcatttttgcccgaagcaaaacgatttcaaatgcgctccgcttcgctctgcgcataattcaaggaattgcattttaattttgcagctcagccaagcctgcgggcttggctgagctgctttttcacaggagggacgcaaaggaaaacggcagctgccgcgctcgtttcctacggaaacagtcgcgcggcgggtaaattccctactaaccagcagagaattccccgagcaaaccgctgcaccaagaaagcatcccatcatcgaaagctttttcatccgttggcttatagagtcaaagtttttctttgaggaaatcggcagagcgcggcgatgactgaaagggtcgagtatacaaaaaggactgctatactgggcaaaacccatgtacagcagtccttttttgcacaaaagagagctgacggaactctttgcagcgcacgataccccgacctgcctacgccattcccatacagcaagcagagccggaattgcgacgcatcgagtaactttatcgactgcaacccccaaaaggcccgccgcagaaagttccgtcagcagaggtctgcgcatctctgcgcaacccaaaagcaaaggtagacagcctgcttacacgcaccgcaggccgttttccatccagcaacaaagctcttaaaaagaagggtgttacccttccaccgcaacgtgacaatgtccgcacggaaggcttcctttactggctttagtatagcagagttacgcttgtgttgcacaaaaactgtcatattctgacggtgcagatgtcatgaattgccggtgggcaccgcacaggtaaagcggaaccaattgtcccggcagctcagggtatactccgcgccgtggcgcagcaaaacatcccgcacgttggaaagccccatgccgtggccgggctccttgcgggtggtgcggggcaactgcccatccggcggcagctccacgtcccgctgcacccgattgcgcaccgagagaaggtattcctcctccgttttgcgcactcgcacgtagacctccggcgggtacgcctgcgctgcggcacagatggcgttatccagcagattggccagcacggtgaccatatccaccccgctcagcggaaaatcccgcaggtcgcaaagatcaaaatacacgcttacgccctgccgggtggcttcctcgtacttgcgagtcaggatggagtccaacagcgggttgtgggtgtccataatggtagtgctggccgccacggccttatccacaccggcaatatagtcctgcgcaccggccacatctccctgtgccagcaaggcacgcaacgcaccgatatggttggtgaattcgtgggtcaggcggcgctgggcggtgtaggaatccagcagagccgaagcccgctgctgctccagttcggcctgaaaatgcaggctgcgccgctgcatgacctgatcgttgaacatagccacgatgcacagatgcaccatgacagccaccgtaagccccactgtcatccccattgtggccatggtggcccttttgttgttatctgtgagcatgagcaggatgttcagcaccacgaccacgcccggaaaaaagctcatggtcagcgcctgcaaaggctccagcgcattgtatctgcgccacttgcccacaaagaacgataccccggtgctgactaccagatttgcgaatgacattatgatcagacaatctgcgcgctggatgacctgctgtagctcacactccagcatccacgatatgacataccgcacactgttttcaaccaacaggcacatggtaccgttgatcagacaggcggtaaatttctgccccggtgtgccgccaaacagcataactgtgatgaacagaaaaagaagcgtgtaaaccactgccatcggcgtaaaaaagccatggttgcgcatgaccgagagggtcatcgtaagcatggttataactccggaccacaccagagggtgctttaccctacccttgccaaggtaagcatattcaaccatgataaagccgagccattgggtcaggcagacccagtggccgtacatataccagcgccagaattcttcattcatcaccgaactgccccttccattccagccatgcgctgcggatggctgtatagtactgtcggctgacgctcagttctaccccgctgcgcagctccaccttatagttgcggatggagcgcacatattgcagattgaccacatcgctgcgccctacctgcaaaaagccgttttcgtacagcatggcgggcagatcagcgatcttgccgtaaaaggtgcagatgggctggtgcggaatatcgccgtagacgttgatctgccgcagagcgctttccagataatagatctgatccagcgggatctcactggtggtacggttgtggtgcacctccagcgtttttcgggggtcggacatgccggaaaaaatatcctccagacagctaggcagctgggcggcaatatcccgcttgagtaggtagcggtaagcgttgaccgtgtagccctgcggggcaaattccagataagccgaaatgtacaccagcacgatgtctggggcgatctgccgcagcctgcgccccagcgcaatgccgtcggtggttttcaggtctacatccagaaacgccagctggtagcgttccagctccggggtagccagcagctgctcgccgctggtgcagacggtgctctgcacctgaatctcccgggcgcggaaccattccgagatgtactcgtccatctgtgcagcgaaggccgcatcatcgtcacagaccagaatgtgcatgggtgtgtttcctcctttttgaatacaaaaaagcatatagcagtgtttcccgccgggagaagcaccctatatgcttttatattacacttgttccgcctgttcgtcaatcaaagacggagcagacgctgggatcacttatgcaaggaatttatcgtagagaccaaatgcaaagatgaacaccacgatgagcggcagcacataggtcaggtagccgcgcatccagtcctgcaccttgagacccttgccggtgttgacctcttttttatagttctgccagccccagccgtagcgggtaacgcagaacagcagatataccaggctgcccagcggcaggaagaggttgctgaccagaaagtcctctacatccagcacagcaccgccgaacactgcaaagccatcccatgcccacaggttatagcccagcacacagggcatggacagcaggatgatgagcacaaggttcaccagactggactttttgcggctgcagccagtcagttccatgccacagcagatgatattctcgaacactgccagcacggtggacatggctgcaaaagccatgaacaaaaagaacaggctgccccacagccgccccatggacatattggcaaagatgttgggcagggtgataaagataaggctggggccgctggtctggtccacatggtaggtaaagcaggccgggaagatgatcagaccggcggtaatggctacaaaggtatccagcaccacaatgcggacagattcgcccagcagggagtgctccttgccgatatagctgccaaaaatggacatggctccgatgccaaggctgagggtgaagaaggcctgattcatagcggagaccagcgtgttgaccacgcccacttcctgcatccgggtaaagtccggcacaaggaagaaagaaagcccttcctttgccccgggcatgaacaggctgttgacagccagcaccaccataatgaggagcagggcaatcatcatgcccttggtcacacgctccagaccgctttgcagccccttagcgcacaccagaatgcccactaccaccacgaataccatccagaaggtcatggtggcggggctggccagcatttcggtaaacttaccagctacctgctcggcgttcagccctgccagcttgccgacggcagtcatgtagaaatagtgcagcatccagcccgctacggtggtgtagaacatcatcagcaggtagcagccgatgagggtaaagtagccgtggatgtgccacttctgccccggcttttccagcgcctgatacgcccgcaccggacttttgcgggaggcgcgtcccacggcaaactccatggtcatgatgggcagacccagaatgaccagaaagatcaggtagaacagtacaaaagcaccgccgccgccctgaccggcgatatacgggaacttccacacattgccgatgccgatggcgcagcctgcggaaagcaaaataaagccaagacgggatttcagagtttctcgttccatgatccgataactccttacttctgcttccggggtgcgtttttacccacagggccgcggggacggcgctcggcagccttggactgctgggcagcactgcgggtctgtgcacggcccttgacggctgcggcgcgcagaccgttcacctcggccttggtcagctcgcggtaggtgccgggcttgagcatacccagtttgaccacaccctcagcgttgcgcttcaggcgcaccacctcaagacccacgctctcgcacatccggcggatctcgcggttcttgccctctttcagggtcatttccatcacggtgcggccgggctcgtcggtgaccacattgatggcacagggcatagtcttggtgccgtcatccagcacgacgccgctgctcagcttgaggatggtggcctcgtcggcgcggggctgcacggtaacgcggtacagcttggagatgccgccggacggatgggtgacagcctgcgcaaaggcgccatcgttggtcatcagcagcagaccctcgctgtccttatccaatcgtcccaccgggtacagacgggcggggatgtcgctgaccaagtccatcacggtcttgcggcccagttcatcgctggcggtggtcacatagccacggggcttgtacagcgccagataatacagctgctggttcttctggatgtagatgcgctcgtcatccacatggagcacgtcacggttggggtccatcttgtcgcccacctttaccgggtggccgttcaccttgacgcggccctcggcaatgatctgctcggcggcgcggcgggagcacagaccctgctcggccatgatcttctgaatacgttcttctgccataatattactccttgtgcgcctcacggcgctcaaaacgcgcaccgctcccctgcttttgcagggcacggtgcgcggctatataaaccgcaggccaaaaggtctgcggctgcggcttgatttgtataaagggttactctgccttgggctcctctgcgggtgccttatcgtcctttttgaccagagcggtgagcttttccaccagctcgggcagcatggtcagggcacggtcgatgctgttggagctatccgacagctggatggtgcgcacgcaaccatccttgatgaccagaaatgccaccggctggatgttgacaccggcaccggagccgccgccgaacagatccttgttggcagcattcttgccgttaaaatcggtaccgccggaagcgaagccgaagctcaccttggacaccggcaggatggtgatgccatcctcggtggtgatgggcttgccgataatggtgttggagtccaccatctggtggatcttttccatcgtaacattcatcagaccctgaataggatgctctgccataaaacaactctcctttattcatccgtgcaggcaacagcccgccggaaagcattctgatatagatttagtgtatcatcttcaaataaaaatgtccaatacttttttgcgccagaactcatacagcacccgcacagcggcaatgacgatgaacagcgcctgcgcactgacccggaaggataccctatcctgcacggtgggctgggcgctgccgaaatccggcagaacgcgcagctggtcaaattccagaaagaaacagtgatccaacacgccaagggtcgggtacagccatgcctgcagcttgccgtaattgcgggcagctgcggcggggtcgtccccgcgcacgccaaggcagaccgagatctttgtaaaacggatggtgccaaacaccgcccgcagcagcgtacctgcgccccgcagcatagtgcagatcacatccagcgtgatctttgcctttttgcggggcggcttttcggctttgggctttgcgggctgcgcagcctttttgtgcttgcgctctgcacgccatgcgcggaattttgctttcagcctgccggtaaagccctttggttcttccggctgggcggaaggttcgggctttgggtattggaacaccgggaaggtgatgcccagtgccccggcttttacgatgagcgtatcgttttgccagcagacatccgcgcagaaggggcacagcagcaacagcgccgccagcaccagaatgatcagcagcaggatgcccaccgccttgaggatgaacagcagacaagcgcccactgcggaaagaaccatgcccatgggtcagccctcactttcggtcggatcatctgccggtgcatcgctgtgcaccggcggcaggtctgccagactggacagaccgaacacacgcaaaaaggtatcggtggtgcggaaactgaccgggcgacccggcagatccagacgtccggcttcttcgatcagccccttttccagcagaccggacacgctggaggaggaatctacgccgcgcacctgctcaataaaggcgcgggacaccggctggttgtaggcgatgacggtcaaagtctccatggccgcagggccaagcggtacggcgcggcggctgtccagcacgcggcgcacacagtccgcccactgggtcttggtggcaagttgccatcgggtattgagatgcagtaggcacagaccgctgtcctcccgctggtagcgtgtatgcagggcttccagcgcagcatccacgctggattggggcagctgcactgcctgtgccagcttatcggcagctatgggatcgccgcaggcaaaaagcatggcctctacggcggcaaggatttgtttttggttcatgggttctccttattgcgttccgggcgggtgcggcgcatggtcagttctccccggtcatccagcgcgatgcgtccgccgcgcaccagctccagcagcgccagaaaggtagctacgttggtgctgcggctctggctgcgggaaaacaactgctccatttttgccactgtgccgcccagcatccggcgcaggatgtacaccacccggctggtgaccgataccatgggcgcggtgaccagcggctcgaactgctgctgggtgggcacacggcgggttttagtgcggcctgccagtgcctgccagtagtcggccagtatctgcggggcgtggtgcagcgcgtaggtgttgtccaactccatctccatgggacggcgcacgaataccggggcagcttccccttttgcgcgcagcagagccgccatgtggcggcactggtcgtactcgatgagctgaccggtgagttcctgtttcatgcgctcgccctcttcgctgcggggcagcagcagaaagcttttcatctccaccagatgcgccgccatctcaatgaaggcactggcagtctcggggtcggggtcggcctgctccacggtgcgggtgtactggtcgatgagctgcaaaatggggatgttgtgcagatccatcttatgcttggccaccagcgccagcaataattccagcgggccgtcaaaatcttctaaatggaaggtcaattcctctgccactcagatcaccgccccaaggctgctggcgtaaacggcgtaggcgattttatcgatatacccggtgcccgcacccaaaagcgaccacaccgcgttgttcaggtagtacagcggcacatccagaaagccgccccaaaccgccgccagcataacgatcatgatatatttttcgtaccgcatcaggccaaaatagatgcgctgcggcagcaccaccagcaaaatgcggctgccgtccagcggcggcacggggatcaggttgaacaccgcaaggctcacgttcatcagcaccagataccgcaaaaacatggcaatatagatggtggcattattgaccggtgcccagtagtacatcaccttccatgccaccatgccaaggtaagccagcacaaggtttgccacagggcctgccagcgccgtaagcgccatgccccacttggggtttttgaagttgcggggattggtggacacaggctttgcccagcccacgcccgcaaacaccatgcataaggtacccagcaggtcaaagtgggcaaagggattcagcgaaagacgcccctcgcgtttggcggtggcatcgcccagcagccatgctgccagcgcatggccggcctcgtggaacgggatggccaccagcgccaccagtgcgcggatgatataataggttgcctgtgcggtcatgtaaatctcctgtcaaaatgaatttcttcctttataatactatttttttgcgccctgcacaagccccactgcgccgggaatacaaaaagctgcaggaaatttaaaaaaaggcttgctttttctctgcatctctggtaaaatagtcaagctgattattttgattccatacttcactgtaggaggtgcaattaccatggctaagtgtgaatgctgcggcaagggtgttacctttggtatcaaggtctctcactctcatcgccgttccaaccgtacctggaagccgaatgtccgtcgtgtcaaggcggtcgtggagggctctcccaagtatgtctacgcatgctcccgttgcctgcgcgctggcaaagttacccgcgctgtctaatttggtgtatgtggccggtcactttgtcgagtggccggcttttttatttgccgcaaggagtggaataaaatgtctttgcctgttgatcccatcatgctgctgagcgtggtgaacctgaaactgcgggatcagtataaagatctcgatgcgctgtgcgaggatctggaggccgacaaggccggtctgtgcgcaaagctgcacgctgtgggctacgattacgacccgcagcgcaaccagtttatctgattatagcttccaaatccggcaccggtgcgcagcgactgtgcccgggccggtgaatgataaaataaggagtgcttgatttatgatccagggtacctattacaaagagtggagcacggttcttggccgtgagatggagtttaaggtgtacggccatgccggtgtgccggtgctggcactgcccgcccgcggcggccgtttttacgactgggagaacaacgggatgcccgatgccattgcccagctgctgaacgagggcaaggtgcagctgttctgcgcggatgccgtggacggcgagggtcttttgaatggcgatctgccccagcgccgccgcgccgagctgcaggaaaagtattttgtctacctgactgcagaactggccccccgcattttgaccctgaacaacgccaaaaagggcacccggatctggactgccggtgtggacttgggcgcttaccacgccgtccactgccgtctgcgccgtcccaccctgtttgcaggtgctgtgggcatgggcggtatctacgacctgacccgcttctggggcaccgacagcgacgacatggtgctgcgctgctctccccttgcctatctgcaggaaagcggcattgccaacaagctggcattgaccaaggcagaagagaactgcctgatcctctgtgccggtcagggtgcctacgagggcgacgcactggacgatacgcagacactggccgacctgctgaaggatcagggaatgcccgcacatctggaggtctggggcggtgatgtctcccacgactggtactggtggggcaagatgtggagcttgtttgcaccgcgcattctggaagtaaagtaagaattttaacgagggaaagcctgcggggcttccctcgttttcttatgtgcaacgattttaaatggcctccgcgtgcgctctggccatattcagcggaattttatcttttaatttatggttcagaaacacctgcggcgtttctgaaccatttttgtctgctgcattatttaaatttcatttcctacttgaattgtcggatattgtgtgctatactgctgttgcaagcaaaatataccccatgggggtttataaagggagcgattccgagatggaagagaaccaaaagcactgttgttgctgcgataatgcgccggaagcggacgctgcggcagatgctgctgtcccctgctgctgccgccacaaagagcgcagcccggaggaatacaaggccctgctcaaccgcctgaaccgcattgaagggcaggtacgcggcatccgcgggatgctggaaaaggaagcctactgtgtagatattctggtacaggtggctgcagccaatgcggcgctgaacagcttttcccgggaattgctggcgcagcacatcggcagctgcgtggcggacgacctgcgtgccggcagcgacgaaaagctggaagaactgctccggctgctgcccaagctgatgaaatgaccgcccgccgggcaaactgaccacaaggagaaaaagcaatggaacaattcaatgttaccggcatgagctgcgcggcctgctctgcccgggtagaaaaggccgtaaagagtgtgccgggcgtcaccggctgttcggtaagcctgctgacaaactccatgggcgtggagggcaccgcagaggatgccgccattatccgcgccgtggagcaggcaggttacggtgcaagccccaaaaaggccgccgcagccgccagcaccagcgcagagctggacgcgctggctgaccacgaaacgcccaagctgaaacggcggctcatcgcctcgctgggctttttgctggtgctgatgtacttttccatggggcacatgatgtggggctggccgctgccacgctggtttgacggcaaccacattgccatggggctggtgcagttgctgctggcaggcatcgtgatggtgatcaaccagaagtttttcatcaacggcttcaaagggctggtgcaccgctcccccaacatggatacactggtggctatgggctcgatggcaagctttgtgtggagcacctacgccctgtttgccatgaccgatgcgcagctgcacggcaacagagaactggtcatgcactacatgatggagttctattttgagtctgccgccatgatcctgaccctcatcacggtaggcaaaatgctggaagcacgctctaagggtaagaccaccgatgcgctcaagagcctgatgaagcttgcccccaaaactgccaccctgctgcgggacggtaccgaggtgaccgtgcccattgagcaggtgcagaaagaggatatctttgtggtgcgcccgggcgagaacatcccggtggacggtattgtgctggagggcagcagcgccgtgaacgagagtgccctgaccggcgagagcatcccggtggacaaggccgtgggcgataaggtaagcgccgccaccaccaaccagtccggctatttgcagtgccgtgctacccgcgtgggcgaggacaccacactggcgcagatcatccgcatggtcagcgatgccgccgccaccaaagcccccattgcaaagatcgccgataccgtatccggctttttcgtgcctgcggtcatcagcattgcggtggtcaccacccttgtctggctgctgctggggcgggatgtgggctacgcgctggcgcggggcatctcggtgctggtcatcagctgcccctgtgcgctgggtctggcaacgccggtggctattatggtgggcaacggccttggtgcgaagaacggcatcctgttcaagaccgctgcggcgctggaagaagctggccgtacccgcatcgtagcgctggacaagaccggcactatcacctgcggcgagcccactgtcaccgaccttctgcccgctgcggacgtgaccgaaaccgagctgctcacgctggccgccgcgctggagggccgcagcgagcacccgctggcgcgggcagtgctggcctatgcggaggaaaagcagctggagctgccctctgttaccgattttactgccctgccgggcaacggccttaccgccaagctggaaggcaaggagatctttggcggcaatgctgcctttatcggtgcaaaggtcgctatccctgctgcgctgcaaacgcaggctgctgcgctggctgcacagggtaaaactcccctcttctttggcggcgcaggtcgtttgctgggcgttatcgcggtggctgataccatcaaggaggacagcccgcaggccatccgggagctgcggaatatgggcatccgggtggtgatgctgaccggtgacaaccagcgcaccgccgaagccattggccggcaggccggtgtggacgaggtgattgccggggtgctgccggagggcaaagaagctgtcatccggcagctgcagaagtacggcaaggtagccatggtgggcgacggcatcaacgacgcccctgctctgacccgcgccgacaccggcattgccatcggcgcaggcacggacgtagccattgacgctgcggacgtagtgctgatgaactccaagctttcggacgtgcccgccgccatccggctgagccgcgcttccctgcgcaacatccacgaaaacctgttctgggcgtttatctacaacatcatcggtatcccgctggcagccggtgtgttcattcccttggggctgacgctgaaccccatgttcggcgcagctgccatgagcctttccagcttctgcgtggtgagcaacgccttgcggctgaacctgtttgacctgcacagcgcaaagcgtgaccacccgcccaaacacgtccctgccctgcccgctgcccttgtgcagcccgcagcggaggaagatacaactgcatccaatcaaaaggaggagaccgctatgaaaaagaccctgaccgtagaaggcatgatgtgcccccactgtgaagcccgcgtcaagaaagcgctggaggctctgccgcaggtggacaaggctgttgtcagccacgaagccggtactgctatcgttaccctgaacgccgaagtagacgatgaggtgctgaagaaggccgtggaagcacaggattatcctgttaccggcattcagtaaggtacagcccttgcaaaggcaaaaggcagctgcgtaaatttctgcgcagctgccttttttgtaagtaggacgattttgaatgcgctccacgttcgccttgcgtatctttagagggaaaaatattttatatttgcaagcggggaaaatctgcggattttccccgcttgctttttcacgggagggccgttaccggaaatggcaattttataggcaaagccgccatcaggagcgcaaaaagcccgctgcaaggcggaatgtccttgcagcgggcagcatagataactggggaacccttatcagacttcggtgttgaagtagcgcttcagcaggccctcgaagccgcggccgtgacgggcttcatcctttgccatctcgtggacggtgtcgtggatggcatccagattcagcgccttagccttcttggccagatccatcttgccggcgcaggcaccgcactcggcctcggcacgcatcatcaggttcttcttggtgctgtcggtcacgacctcgcccagcagctctgcaaagcgggatgcgtggtcagcttcttcgtaagcatagcgcttgtaggcctcggcgatctcggggtagccctcacgctctgccacgcgagccatagccagatacataccgacctcgctgcactcgccctcgaagttagcgcgcagaccatcaacgatctcctgcggcacgccctctgccttgccgatgccaacaacgtgctcggtaacataggtgttgccggtcttctccacaaaagcggaagcgggagccttgcaaacggggcactgagcggggatctcaccctcagcgatataaccacaaacggtgcaaacgtatttcttcataagaatttacctccattcgatctgttaaaaataacacaggacggaaaccacccgcctgttgcttctatgcggggcagctgcgctgccgggtatagaaagagccacggaaggagctttgtgctttgtgcacttccctttccatggctctattatagcgaataattcctagttagtcaagtatatttttaagaattattcctacttattaaaatctggcagaatgtccaaattccactgcagaaaactgggtgcattaccggaatcagacctgcaggttgccgctggtagcagcatcggagccggcggtagcgtcaaactcgtagtcgttgccgggcaggatggcgttgagcagaatgcctgcgatagcagccacagccagaccggacaggttgatggtgacgctgccaacggtaaagccaacgccgcccacagagttgaagcccagtgcgcacaccagaatgacggcggcaacgatcaggttgcggctgttggtgaagtccacgcggttctccaccacgttgcgcacaccgatggcagagatcatgccgtacagcacaaagctgataccgccgatgatgccggtggggatggtgttgatgacagcctcaaacttggggctgaagctcaggatgatggccagcacagcggcaatacggatgaccagcgggtcgtagatcttgctcagtgccagcacgccggtgttctcgccgtaggtggtgttggcggggccgcccagcagaccagccatggtagtggccagaccatcgcccatcagggtgcggttcaggccggggtcattgatatagttgtggccgacggtggcgctgatggcggcaatatcgccaacgtgctccatcatggtagccagtgcgatggggatgatggtgaacagcgcactgatgaactccgggctgccgtcaatggcgaacagacccatagcctccttgtgcagggggatgcccagccaagcggcttcggagatcttctggaagtccactgcgccggtgaccagtgccaccgcgtaggagaccagcacgccgatgaggatgggcaggatcttgaccatgcccttgccccagatgttgcacacgatgacagtgcccagtgccacgaaagccagcagccagttggactggcagttggtgatggcagagggtgcaaggatcaggccgatggagatgatgatggggccagtgaccaccggcgggaagaacttcatgatgcgacggatgccaaaggtggagatcagcaggctggccaccagatagaccaaacccgagaatgcaatggcagcgcaggcatagggcagcatcttggtgttggcaacggtcaagttgccattggcatcagccagcatgggagccacgatggaaaagccgcccagatacgcaaaggaggagccgaggaatgccgggaccttctttttggtgatgaggtggaacagcagggtgcccagaccggcacacagcaaagtggtggaaacgctcaggccggtgagcagcggcaccagaaccgttgcaccgaacatggcaaacatgtgctgcacacccagaatgaacatccggcctgtgcccagctttttggcgtcgtatacgcctttggagtaatcgatcttttcgctcatagaaaacctcctgtactgttattcccaaaaaaagaggcattgccgttaaaacagcagtgcctctgaatttcaggaacaagacctccacacaaaaacgggaaagaagccgctatgcagtcgctcacacttaaacattgtgctcctccccttctttttgtgttccttccaacaaccggaaccgctccggcaagggcacggcaacgccgcagcctttttgataagtatagcagattttgggctttccagcaaggtgttgacagctttttcttgtctgttgcgccgcgccgtaagctgcgggggttgcgttttgcggcagaatcgcctataatagagcctgttcttatttcctatcataccgatgtgttgatattgcaggaggttctatgctttatctggattattctgccaatacccctgtggacgaggaagtgctgcgatgcttctgtgaagcagagcggcgctacccgggcaatgccaacgcccaccatcaggcaggcgctgccgcaaaagctgctatgaacgaggcgacccgcagcattgcccgctgtctgggcgcaccacctgcaggtatcatctatacctccggcgcaagcgaagccaacaaccttgctgtaaaggggctagcggcgctgggaggtgcggcaggcaggcacatcctctctaccccgctggagcattcgtccgtcagcggcagtctggaggccctgcaaaagcaggggtatgaggtggagctgttggacatccggtcggacggcacggtagaccttgcagacctgaaaaagcggctgcgtccggacacggttctggtggctgtgaccgccgtggacagcgagctgggcgtagtgcagcccattgcggagattgcagagcttttaaaggcgtatcccaactgccattttcatgtggacgccacacaggctgtggggaaaattcccgtacagtttgagggcatggacaccatgagcctgacagcccataagttttacgggcttaacggcatcggtgtgctggtaaaacggctgggactggcactgccgcccctcattcatggtggagagagcactaccccctaccgcagcggtacgcctaccgtagcccttgcctgctcgctggcgctggccttggaaaaggctactgcggaacttcccgcccgcgccgcagccgtgcgcagcctgaacgaccggctgcgtgcggagctttcccgctatccaaaagtgcgcgtcaacagccccgcaaacgctgtgccgcatatcctgaacctgagcgtgcagggcgtaaagggcaccgtgttccagcgggagctggacgcacgcggggtgtgtgtctcggtcaaatccgcctgttcgtccgatggactgccctcccgggcagtgctggctgtcagtcaggaccggcgcaatgccctttcctcttggcgcatcagcctgagccaccttaccacagaggaggaattgaccgcctttctgcacgcctttgcagactgctacaacaccctgacacggtaaaaaagctttgaaactgaaccgcttacaactgccataaacaaaacaaaaagaccttcccgctctccggaacgggaaggtctttataaattgctagttagccttggaacttacgttcaaggacaaaatcactcaatgatcttgccaacaacgccggaaccaacggtacggccaccctcacggatagcgaaacgcaggccctcttccatagcaacaggggtcagcagctcaacgtgcatcatgacgttatcgccgggcatgcacatctcagtgccttcgggcagggtgatgatgccggtcacgtcagtggtacggaagtagaactgaggacgatagttggagaagaagggagtgtgacggccgccttcgtccttggtcaggacgtagacctgagcctcaaagacgttgtgggggtgcacagaaccgggcttagccagaacctggccacgctcgatctgagtacgatcaacaccacgcagcagagcgccgatgttatcgccagcctcagcgaagtccagagacttacggaacatctccagaccggtgatggtggtgttcagacgatcgggcttgatgccgacgatctccatagcatcgccaaccttggccataccacgctcaacacgaccggtagcaacggtaccacggccagaaatggtcatgacgtcctcgatgggcatcaggaagggcttatcctcctcacgatccgggttggggatgtaggagtcaacagcgtccatcagctccttgatgcaagcgtaagcgggatcctcaggatcgttgggagcctccagagccttcagagcggaaccacgaatgatcggggtgtcgtcgcccgggaagtcgtactcgctcagcagctcacggatctccatctcgaccagatccagcagctcctcgtcgtcgaccatatcgcacttgttcatgaacacgacgatatagggcacgccgacctgacgagccagcaggatgtgctcacgggtctggggcatgggaccatcggtagcagcaacgaccaggatagcgccgtccatctgagcagcaccggtgatcatgttcttaacgtagtcagcatggcccgggcagtcaacgtgagcgtagtggcgcttctcggtctggtactcaacgtgagcggagttgatcgtgataccacgagcacgctcctcaggagccttgtcgatgttagcgtagtccatgaactctgcatcacccttcagagccaagtacttggtgatagcagcggtcagagtggtcttgccgtggtcaacgtgaccgatggtgccgatgttaacatgcggcttagaacggtcgaactttgccttttcagccattggaatatcctcccttaatttaggttttgatattggttacaacaaccctgcaaaatgcagacattgcactgcaaggctattctactaaatttgccctgtaaaatcaagtgcttttacaggaaattttgccggagttacactaccccggcaaaattcttatgctttacagcgcttagcccttggtacggccagcaatgatctggtcagcaatgttcttgggaaccggctcgtaatgagagggctccataacatactggccacgaccctgagtcttggaacgcaggtcggtagcgtagccgaacatctgagccagaggcacaaatgcgttgacacgctgggtaccagccatagcttccatgccctggatctgaccacggcgagcgttcaggtcaccgataacatcgcccagatactcatcgggaacgataacagcaaccttcatgatgggctcagtgatgataggatcagccttgcgcatagcatccttgaatgccatagaaccagcgatggagaaggccatttcagaggagtcgacctcatgataagaaccatcccacagggtgaccttgacatcaacaacaggatagcctgccagaacgccagccttcatagcaccctgaataccgttgtcgatagcagggatgtattccttcgggatagcgccgccaacgatagcgttgacgaactcgtaacccttgccgggctcattgggctcgatcttgatcttaacgtgaccgtactgacccttaccaccggactgacgtgcgtacttggtctcctggttggcctccttgcggatggtctcacggtaagcaacctggggtgcgcccacgtttgcctcaaccttgaactcacgcagcagacggtcaacgatgatctccagatgcagctcgcccataccagcaatgatggtctgaccggtctcttcatcggtgtaggtcttgaaggtcgggtcctcttcggccagctttgccagcgcgatgcccatcttctcgttaccagccttggtcttaggctcgatagcaacgcggataacgggctcggggaacttcatggactccagaatgatgggatgatcctcatcacacagagtatcaccagtggtggtgttcttcagaccgacaacagcagcgatatcacctgcgtagcagcagtcgatatccttgcggtggttggagtgcatctgcaggatgcggcccatacgctccttgttgtccttcacggagttgtagacagtagtacctgcctcaaccttaccggagtacacacggaagtatgccagcttaccaacgaacgggtcggtagcgatcttgaaagccagagcagcaaacggagcatcgtcagaagaaggacgggtctcctgctcttcggtctcaggattcacacccttgatgtcctcgacatcggtaggtgcgggcatatagtcaacgatagcgtccagcagcttctgcacgccgcggttcttgtaggaagaaccacagacaacgggaaccagagtatttgcaatggtctccttgcggatagcagccttcagttcctcacgggtgatctcctcaccctcgaggtacttctccatcagctcttcgtcgttctcggcaacagcctcgaccaaaatgttacggtactcttcagcctgctcgaccatatcctcggggataggctcggtgcgcatatcgttgcccatatcgtcgtagtagacctcagcgttcatatcgaccaggtcaacgataccacggaaggtatcctcctgaccgataggcagctggatcgctacgccgttagcgtgcagacgatcgtgcagcatcttgatgcagcggaagaagtcggcacccatggtatccatcttgttgacgtagaccatacggggaaccttgtactcgtcagcctgacgccaaacggtctcagactggggctcgacaccgcccttagcggccagaacggtcacagaaccgtccagcacgcgcagagaacgctgaacctcaacagtgaagtccacgtggcccggggtgtcgatgatattgatgcggtgacggttcttcttgaatgcgaccggatccttctgggtctcagagtggctccagtagcaggtggtagcagcggaagtgatggtgataccacgctcctgctcctgaaccatccagtccatggtagcgccgccatcatggacttcgccgatcttgtggttgatgccggtgtagtacagaatacgctcggtagtcgtagtcttaccagcatcgatatgggccataatgccgatatttctcgtcatctgaagagaaacttctctgggtgtagccatgaaattaacctcctacagaacagatcaataacggaaatgtgcgaaagccttgttagcttctgccatcttgtgagtatcctcacgcttcttcacggcgttaccagtgttgttggcagcatccatgatctcagcagccagacgctgtgccatggtcttctcaccacgggtgcggctgtaggcagtgagccagcgcagacccagagtctcgcggcgagcggggctgacctccagggggacctggtagttagcaccaccaacacggcgggtcttgcactcgaggctgggcatgatgttctccatcgccttctcgaaagtctccagaggatcgttgccagtcttttcctgaatcatggagaaagcttcgtaaacgatcttctgagcgacgcccttcttgccatccagcatgacgctgttgaccaggcgggtgaccatcttggaattgtaaataggatcagctaagacatcgcgcttagcaatgttacctcttctaggcatctttcttccctccttcacagaatgatatcatcggtactcgaaagtaataaaactcccgttgtgtcacaaagagctgaccttacataaaccgttaccctccgcttttaagcggacttgttatttatataaaggaaagccgtttatggcggttgtcctcaattacttctttgcagcaccggccttaggacgctttgcgccgtacttggagcgggcctgattacggcctgccacaccctgagtatccagggtaccacggatgatgtggtaacgcacaccgggcaggtccttaacacggccgccacggatcagcacgacggagtgctcctgcaggttatggccgataccgggaatgtaagaggtgacctcgataccattcgtgaggcggacacgagcaaccttacgcagagcagagttaggcttcttgggggtcatggtacgaactgcagtgcagacaccacgcttctgggggctgctcagatcagagtactgcttcttctgagagttataagtcttctgcagagcgggagcggtgctcttggtagtcaggacctcacggcctttgcgtacaagctggttaaaagtaggcattttgtttctcctttcttaatgatgaacatcggaagcattttccgactttttagccgcactatccccatgagggacgcgcaacagttatataataccctctttgcagccggatgtcaacagtttttgcaaatttttttgtatttattccagattttttctttcgggcaattttcggcagaaaaagtgccttttccctcccctgctgcgctgcttttcgcacgcaaaaaccgccccgcaggctttcgcccacggagcggttttgtttaacggatcagatcctgacagatgccgcgcttactgtgcggaggcagccagctcggctgcgatctcggcatcgcgctcagcctcacggttcttcagatcctcacgcacctccggcagaccggtaccggcggggatcagcttaccgatgatgacgttctccttcagaccggacagcgggtcgaccttacccttgatggcggcctcggtcaacacgcgggtggtctcctggaaggatgcagcggacaggaaggagtcgttggccagagcagccttggtgatgcccagcagcacctgctggtactccaccagcttcagaccctcttcgcctgcatcaatgcgcttctgcagatcggcattgatgttctccacctccagacggcttgccagagcaccgccaatcaggttggaggagccggagtcggtcacacgcaccttgcggcacatctgacggacgatgacttcgatatgcttatcgttgatctcaacgccctgcagacggtagaccttctggacctcgttgatcaggtagttctgcacgtcctccagacccttgatggccagaatatcctgcgggtacagcacgccctcacgggtgatgatgtcgcccttctccacgcggtcgccgggcatcacgcgggaatgctgagtgaacgggatggagtagctcttgacttcctctgcaccgttctcgtccttgccggtgaccttgatgaccacgttcttcttggtgtcgtcctgagagaccacaccggagatctcgctcatgatggccatgctcttgggacggcggctctcgaacagctcctcaacacggggcagaccctgtgtaatatcctcggcagatgcgataccgccggtatggaaggtacgcatggtcagctgagtaccgggctcaccgatggactctgcggcgataacaccgacagactcgcccagacggaccggctcgccgttggccatatcggaaccgtagcagcgtgcgcagacgccggtctttgcacggcaggtcagcaggctgcggatcttcagacgggtgataccggctgcctcgatctcgttggcatcgtacaggtcgatcatcttgccctcgggcacgataaccttgccggtgatagggttgaccacatcgcccacggcaaaacggccgatcagacgctcgcggaagctctcgatcttctccttgccctcgtggatctcagagacccacaggccatcggtggtgccgcagtcgatctcgcggacgatgacgtcctgagaaacatcgaccatgcggcgggtcaggtaaccggagtcggcagtacgcagagcggtatcagccagacccttacgagcaccacgggcagaaacgaaatattccagaatgttcagaccttcgcggtagtttgcacgaatgggcatctcgatggtgtgaccggcggtgtttgccagcaggccgcgcataccagccagctgcttgatctggttcatagaaccacgagcaccggagtctgccatcatatagatctcgttgtccttgggcaggttgtctgccagagccttagagaccttatcggtggtcttctgccagatatcgatggtcttgttgtaacgctcgttatccgagatcagaccacggttgaacagcttgccgaccttggcgatctccttatcggcctcggcaatcagctcctgcttctggggcgggatcacagcgtcgcacacagccacggagatagcagacagggtggagtacttatagccctgtgccttgatggcatccagcatcttagcgcacttgcgggtgccgttgcgggtcatgcagcgggagatgatctcgggcagggtctttttggtcacgcggaagctgacctcgtactccagccagtgctcgggatcggtacgatccacatagcccaggttctggggaatgggattgttgaagatgatgcggccggcggtggcatccaccagaccggtgcgctccacgccgtcaatggtcatggtgcggcgcaccttgatgggcgcgtgcagggtgatgacgtgctcggcgtaagccatcagagcctcgttctcatcacggaacaccttgcctgcgccctcgtcgttctcgcggacggtggtcaggtagtagctgcctaggatcatatcctgcgtaggcacggtaacaggtgcgccgtcagagggcttcagcaggttgccggaagccagcatcagcatcttagcctcacggcaggcatcctcactcagaggcagatggactgccatctggtcgccgtcgaagtcggcgttgaatgcggtacaggccagcggatgcagcttgacggcacggccctccaccagcacggggttgaaggcctgaatgcccagacggtgcagggtaggtgcacggttcagcagcacggggtgacccttgataacggtctcgaggctgtcccagacttcgggctttgcgcgctcgaccatcttgcgggcggacttgatgttgttggcaatgcccttctccaccagatccttcatgacaaagggcttgaacagctccagagccatctccttgggcagaccgcactgatccatcttcagctcagggccgacgacgataacggaacggccggagtagtcaacacgcttgcccagcaggttctgacggaagcggccctgcttgcccttcagcagatcggaaaggctcttcagtgcacggttgttggggccggtgaccggacggccgcggcggccgttgtcgatcaggctgtccacagcctcctgcagcatccgcttctcgttgcgcacgatgatgtcaggagcgcccagctccagcaggcggcgcagacggttgttgcggttgatgacgcggcggtacaggtcgttcaggtcggaggtggcaaagcggccgccgtccagctgaaccatggggcgcaggtcaggcggcagcacgggcagcacatccatgatcatccactcgggacggttgccggagatgcggaaagcctcaacaacctccagacgcttgaggatgcgcacgcgcttctggccggaggacttttccacctcggcggtcagctcagcgctcagctgatccagatcgatctccttcagcagggtctggacagcctcggcgcccatggcagcctcgaactcgtcgccgtaacgatcgcgcatttcgcggtattccttctcggtcagcagctgcttcttgtccagcggggtcagaccgggatcggtgacaatatagcttgcaaagtacagcaccttttccagcaggcgggggctgatgtccagcatcaggccgatgcggctggggatgcccttgaagtaccagatgtggctcacaggagcggccagctcgatgtgacccatacgctcacggcggaccttggccttggtgacctcgacgccgcagcgatcacacaccttgcccttgtaacggatgcgcttgtacttaccgcagtggcactcccagtccttggtaggtccaaaaatgcgctcgcagtacaggccgtcacgctccggcttcagggtgcggtagttgatggtttcgggctttttgacctcgccgtagctccaagcgcggatctgctccggggaggcaaggccgattttaatggaatcgaaaacgttgttttccatgaaacgaaccctttcttaatctctagttgtttcgatgatacaggcggcttttctgttacaggatcacaggcgcttctcccctgccgcagcacgcggccaagggggaaggctgtgttgtgtatccagatcagaaatctacttcgtcagaagcaaccggagcctcggcaccggagttatcgtcctccagcacagaaggatcatcgaaacctgcatcggcgtccttgatgttgtaatcagtcagttcgctctcctgcaccacagtctcggtaccggcaacgtcacgcatatcaaagccggtctcttcgtcgtcgaagttctggcgcatatcgatctcgttgccgtccttatcctgcacgatcacgtccatacccagagactgcagttccttcagcataacgcggaaggactcggggatgccgggctgcgggatgggctcgcccttgacgatggcctcgtaggtcttgacacggccctccacgtcatcggacttgacagtcaggatctcctgcagggtgtaagcggcgccgtaagcttccagtgcccagacctccatctcgccgaagcgctgaccaccgaactgagccttgccgcccagaggctgctgagtgaccagagagtaggggccggtggaacgggcgtggatcttatcgtcgaccaggtgatgcagcttgaggtagtacatataaccaacggtaacgcggttatcaaacttttcaccggtacggccatcgtaaacggtggtcttgccgtcacgatccagctcgatcttggagaagtcgatgatgtggcccttctcgcccatgatcttggggagcttggtggggtatgcaggtgcattctcgccgtgccacatctcgcgggcggtatcaaaggtatcgccgatgtcgttctcgcgggcagagtcaaagacgggggtcatgaccttgatgccgcaggccttggcagcgtagccgaggttgacttccagcacctgaccgatgttcatacgggaaggcacgcccagcgggttcaacacgatgtccagcggagtgccgtcgggcaggtagggcatatcctcctgcggcaggatgcgggaaacgacacccttgttaccgtgacggcctgccatcttatcgccgacgctgatcttacgcttctgggcgatatagcaacggacgacctcgcgcacaccgggctgcagctcgtcgctgttctccggggtaaagaccttgacatccacaatgatgccgtatgcgccgtgaggcacacgcagagaggtgtcgcgcacctcgcgggccttctcgccgaagatggcgcgcagcaggcgctcctcagcggtcagctcagtctcgcccttcggggtgaccttaccgaccagaatatcgccgctcttgacctcggcaccgatgcggatgatgccgcgctcgtccagatccttcagggcatcctcagaaacattggggatgtcgcgggtgatctcttcgggtcccagcttggtatcgcggctctcggtctcgtactcctcgatgtggatggaggtgtacacgtcctcacgcacgatcttctcgttcagcaggacggcgtcctcgtagttgtagccctcccaggtcatgaagccaatcagggcgttcttacccagagagatctcgccgttgcgcattgcggggccatcggccagcacctgaccggcggtgacggtctcgcccacttctacgatggggcgctggttgatgcaggtgcctgcgttggagcgggcaaacttgatcagagaataatcctccagagcgccctgctcgttgcgcaccacaacatggtcggcatcgaccttttccacaacgccgttgctcttggccagcacagcagtgccggaatcggtagcagccttgtactccataccggtagcaacaatgggctgctgggtgaccatcagaggcactgcctgacgctgcatgttagagcccatcagtgcacggttacagtcatcgttctccaagaaggggatgcaagcggtagcaacagagaccatcattcgcggcgaaacgtccatgtaatcgaccttctctgcgtcgatttccaagatctcgtcgcggcggcgggcagacacacggggacggatgaagtgcttgccttcatccagcggctcgttggcctgtgccacaacgtactcgtcctccacatcggcggtcatatactccacctcgtcggtgacgacctgctcgatgagattgttgttctcgtcgtagatcttcttgaccttgcggtagggagcctccacgaagccgtactcgttgatcttggcgtaggatgccagataggagatcagaccgatgttggggccttcaggggtctcaatggggcacatacggccatagtggctgtaatgaacgtcgcggacttcgaagcctgcgcggtcacggctcagaccgccggggcccagagcagacagacggcgcttgtgggtcagctcagccagagggttgttctgatccatgaactgagacagcggagaggagccgaagaactccttgatggctgccaccacaggacggatgttgatcagtgcctgcggagtgatgacgctctgatcctgactctgcagggtcatacgctcacggatgacgcgctccatacgggagaaaccgatgcggaactggttctgcagcagctcgcccacgctgcggatacggcggttgcccagatggtcgatatcatcggtggtgccgatgccgtagcccagaccgttcaggtagttgatggaggacaggatatcgtcgatggtgacggtacggccgatgagcaggtcgtgatccttcttcaggctctccatgacctcctcggcgctggaagcgttatcaaggatcttgcgcagctccttgaggttgcagcgctcgttgatgccgcactccttgacatccacgcccttgaatgcggggtagtagctatcaatgatggcctgtgcgtccacgcagccgttggtaatgaccttgaccttgtggggctgatccttcatgggatcatcgatcttcagcacgaccagatccacgccggcggcatcgatctgctcagccagcttgcggtcgatcttcttgtcggcctcgacaaggatctcgccggtgaagggatccaccacgttctctgcagccacatggttcatgatgcggcgtgccagagacagctttttgttcatcttatagcggccgaaacgggacaggtcgtaccggcgcggatcgaagaacagcatatcgatctggctggtagcggactccaccgtaggaggctcgccggggcgcagcttgcggtagacctccagcagaccctcttcgcggttcttggtggtatccttttccagcgtggccagaatgcgctcgtcctcgccgaagtagttcaggatgtcctcgttagaggacagacccagtgcacggcacagcaccgtgacgggcagcttgcggttcttgtcgatacggacatagaacacgttggcggcatcggtctcgtactccagccatgcaccgcggttggggttcatggtggcgctgtacaggtcattaccgaccttatccttggcatggccgtagaacacaccgggagaacggaccagctggctgacgatcgcacgctcggcaccgttgatgacaaaggtgcctgcgtcggtcatcagggggaagtcgcccatgaagatctcctggtccttcacctcgccggtctccttgttcagcagacgggcggtgacgcgcaggggggctgcaaaggtaacgtcgcgctccttgcactccttgatgctgtacttcggctccttatccagccggaagtccacaaagctcagtgccagattgccggtgtagtcctcaatggtgccgatatcgtggaagacctccttcaggccttcatccagaaaccactgatacgagttcttctgcacctcgatcaggttcggcatactgatgacttcgtcgatgtgggagaagctcatgcgctcggttttgccgagcttaacgggcttgactttcatcataaaatcaaccactccttacttttatattctacgggatgtcgtatacacgggtcaaatttgagcagacacacataattcgacccgcgtcctgcggaacgttccggcgttttgcacaaacttttcggggcaagccctcaagtggcagccatcgcagttccctttttggcgcactagtccattatgtgatactaatgcagtatacacccgaaaacccctgttgtcaagccatttttcagttttttgccgaaataaatttaattttcgctttgttttcgcacgcccggcagcgtgtagctgtttgtctgccaagtacttgatttttttattttgcacgttcctgttcataacacccttgtgcaatttgtctatctttactcttgtgcccggaagtgtgacttttgcacttccctgccgcaaaaaagagaccgccgcacaaaatgctgtgcagcagtctcgtcctgaaaattttatgcgattcactcatccagataatcccgcagcagctttgcgcggctggggtggcgcagcttgcgcagcgcctttgcttcgatctgccgcacccgttcccgggtcacgttgaactccttgcccagctcttccagcgtgcgggcacggccatcctccagaccaaagcgcagggtgatgacccgctcctcccggggcgtcaggcttttaaggacgtgcagcagctcccgccgcagcagctgacgcccggcttcgtccaccgggacaccggcatcttcgtcctgaataaagtcctctaaatgggcgtcctcttcctcccccaccggcgtttccagactgatgggctcctgcgacaattgcagcagctcccgcaccttgtccggttccatatccagtgcgacagcgatctcctccacggtgggctcccgtccatttttatgcagcaggtcgcccgccgttttcttgacccggttgatgctctccaccagatgcaccgggatgcggatggtgcgtccctgatccgcaatggcgcgggtgatggactgacgaatccaccacgttgcgtaggtagagaacttgaagccacgctccggctcaaatttttccgccgccttcatcaggccaaggttgccttcctgaatgagatccagaaaaggcagtccccgcccggcgtagcgcttggctaccgataccaccagccgcaggtttgcttcgctcaaagcgcggcgggcatctgcatctccggcgcgggcagcctttgccagtgccatctcctgtccggcggtcagcagcggcacccggccgatctcctttaaataggtcttgaccgggtcatccagcgccacaccctctgaggacagctcattctccagcctgccgatctgtgcatcgtccagcacgggcagctcggcaggttcctctgccagatggacgccacgctgctccagcgcagcgtaaagttcatccagctgcgcaacatcaaaatccgtttcctccatggcgcggctgatctgctccggggtcagggtgtggcgccgcgcctttgcggcaaggctgcgggcaagttcttccgtttgcgacaatttctgcatgattcctgctccttttctctccagctccagccggagggaaaacagggatcagtcttgttcgggcagcgtcccctgctttttttcgcgcatcgactgaagatactgtgtgatctcatcgccggacattgcagcagctttgcttgcaaccggcattccccgggcgatcctgtccagatacagatggatatcctccggggtgcagttcacatcgctgtattgtgccgcaagtcggctcagttcattcaatgcttcttcgcttacaaatgcccgcagtgccgtcaggctgagctccacgccctcccggctgcaattgagcatcgcttcgtatagttccttctgctgcggctggatgaattgctccgccgtcagctgctgtttagccagttccagataccgcggctcccgcaggatggccgccagcagccgctgctgggcgctggcaatgcccagtgcctgactgccgcctgcgctgtaaggcaccttgatctgatccatctcgccggaatgcagccgctcgtggtttttctcccggcggtacttgccgcctgcccgctttgctgcggtgcccagctgcgccagaatggcggttttggagatgttggtctcctctgccagccgcccggcgtacacctcctgctcggtggggttggagcgctcggccagcatctccacagcatcctttatatattgcagacgctgcgcgtcctgcgagagatcatactgatcccgcaggcgcttgagccggaagtccagcgcattgcccaccccgtccagaagcgcctgaaagcgctccgggccatattttttgatatactcgtccgggtcctttgcaccggggatctgcaaaacgcccacctttaccgggctgttgcggaacagctccagcgagcgcagggtggccttctgaccggcctcgtccgagtcgtagctcagaatgacttcgtcggcatactcgctgatgatgcgcacctgcccgggggtcagcgcggtgccgcaggcgcagacggcggtgtcgatgcccgcctgctgcatactgatgacgtccatgtagccctcgcacagcacgaaccgccgggaggcgctgcgctttgcgatctgcatggcaaacaccgtctcggatttgtggtagaccagcgtctccgggctgttgacgtatttgggcttggagtcgtccatcacgcgcccgccaaaggcaatgatgttgccgcgcaggtcaaagatgggggtcatgacacgcttccagaacaggcagtagatgcgcccggactggctgcgcttgaacaggccgctggcatccagctcctgctggttgtagcctttatcccgcaggtactggtacagcgcctgcccatcgttgggggcatagcccagcccgaaccggacgatggtcttatcgtccagcccgcgccgccgccagtaagcgcgcgcctgccgcgcctcctccacggtagagttcaagcaggcatggaagaagcgggcggcctccttgttcatggaaagcacccggctgcgcaggcgtcccgtcttatcgtcctcctgcggctccggcattccggcgcgggaagccagcatcttgatggcttcgccgctgctgatattgttgatctttttgacaaagctgatggcatctccggctgcctgacaaccgaaacagtaaaagctttgggtgtccgggtacacataaaaggacggcgttttttcgctgtgaaaagggcacagcccgccgtacagccgtcccttgcgtttgagctgcacatagctgcccaccagctccacaatgtcggtgcggcgggtaagctcctcgatgtattcgtgtgggatcatgttgttttaaacgacctctccagttttaaaggacgtgccatttctggggcacgaacagttcttcaaaggtgcggatggcaaactcgtcgctcataccgctgatgtagtcggtgacggcgcgctcccgtccctcctgataggccagctgcacataaaagttggacatccggtctacatgggtcaggtagtattcgtacagctccgcgataagcttgtccaccttctgctcctcacgcttggcgtttttatccacatacacggtcgtgtacatgaaatcccgcagagcaaggaacgcttcgtattcctccgtgcccatgcggacatccccctcgctgtgggtgagaatgctgttgatcatggtggtgatgcgggcagatttggtctgtcccagcactgccgtgcagtccttgggcagggtggcagcgtccagcacaccggcgcgcacagcgtcctcgatatcgtggttgacaaaggcgatctgatccgccaagcgcacgatgcgtccttccggggtagctgcccatgtgcccttggtgtgggtaacgatgccgttacgcacctcccatgtcaggttgagcccttcgccgtccttttccagccggtccaccacacgcaggctttgcatatagtggcggaagccgtccgggcaaagagcatccagagccttttctcccgcgtgaccaaagggggtatgccccagatcatgcgcaaggctgatggcctcggtcagatcctcgttcaggcgcaggccacgggcaatggtgcgggcgatctgcgagacctccagcgtatgggtcagccgggtgcggtacaggtcgccttccggcgaaaggaacacctgcgttttctgcttgagacgccggaatgccttgcagtgcagcacccggtcgcggtcccgctgaaacaccgggcgcagcgggtcctgcggctccggcacagctctgccgcggcttgcatcgctgaaggtcgcccacggcgcaaaggcaagatgctcgatctcttcggttctccggcgcacatccatacagatcctccttttgtttttcgggtttctcccctcccctctgcgcgcagccgatcccaattgctgcgctgcggcaattgtagcacatcggccgtgtcgaagggggaagttcggtgtcggtttgcaaaaaagactttgttttttaaaatggtgcgtagaacgggtcagacaccgtcacctgagcgctgccccgggtcagctcccgcagctgctccagcagcggggcttcggtgtgttccggcatctgccagcgcagggtgacacggtccgtaaactccggcggtgcctgctttgccccggcggcatcaatgagcagggacgcacgttcgtaaagggcgtaatccaccgttacctgcagctccaccacactgcgcactgtgacgacctccgcgttttccagtgcgcgggcggtggcggtggtgtaagcgcgcaccaaaccgccggtgcccagcagcaccccgccaaagtagcgggtgaccaccacgatcaggtcggtcaggccactatgctgcagcacctccagcgcgggcgtaccggcggtctttgccggctcaccgtcatcggaataacgctcgcggttgcccgcccgcaggcggtaggcgtaaacattgtgccgcgcggtgcggttggctgcccgcacctgttccagaaaggcaacggcggcttcctcgctgtcgacaaaggagagctgtgcgataaagcggctttttttctcttcatattcgccggtggctgtgccccggacggtgcggtaatcctccacgttagatcctcctgataataactcagaataagtataacacaaacgggcgcaaataaaaagactgacgaagccttgcggccccgtcagtcttttataagaagaaagcagttgatcacttggtaaagatctgaatccactgatgaccccaggtgctgttgctattgtagtagtagccaacactcatcttgcgagcctcagggttcaggatattggcgcgatggccttcggagttcatccatgcgttgacgacctcttcaggagagacgctgccccatgcggcattctcgccggtgggggtatcggtaacgccgtagtccttcaggacggtaaagcacttggagccatcggggcggacgtgagagtttacaacggcgatctcctcggcgcgggtctgtgcagcggcggtcagattatcatcgcccatttccagagcggtcaggccgtactttgcgcgctgagcattgaccagattcagaacttcctgacggtagtcctcggtgtgagaattttcggggtaagagaagatcagcacccagtagttgttgtagacgccgccctcgtagtggccaacgctcacggtggtggcatcggcgttcaggatgcgctcgcgggtaaaatcggtagccatccactgatccattgcggaatcgggggtggagcagccggccatgtagttctcgccggtggaaacatcgctgatgccgttctctgccagaacggtgaaatcgcgctgaccgttgggacgaacgtaggagtaagaaactgccagctcctcggcacgcttcattgcagcggcattgtggctgctgtcgcccagagcaacgggagccagaccagcctgtgcgcgctcgttattgatcagggtcaggaagctgcgctggtaagcgtcttcctcaaagtaggagttctcttcctccacggaagcggcagcaggcacggcagcctgtgctgcgtttgcggtgacgggcttgaagcctgcaaaaccaaaaaccacagccagcgtcatagcagctgctgcgatattcttcatggtactcattgcacgcttcataagattgcctccggtctgctgccttatacagtgtgatgttgtatgctgcaacttgtttgcaactctgtcgtatcacatctgcaactcttgtgtcacaagagtatcacaaaaccatacagacgtcaagaggttcaaaggctaatttgcagaaaaaatacagattttttaaaatttttccgctcttttactgcaactcaagcgtaacaaaagttccgaaaacgttacagttgtgttgcgcttctcttcaaaatcagccaagtgcaacagcttccgcacactttccgggctgttccgatgcccaccggagtgtatattatcggatttttatacattattttgcatatcaatgctttgtgtacgcttttgtggcgctttgttgcgttcctgtctgcattctcttcttataaggagatttcgtttcaaataagcacacaaaaaaggggctgctgcacatcactttgtgcaacagcccctccgggttatattttactgtttttccttgcggtctcccacaagctttttcagttcatcaagaaagctttccacatccgcaaactggcggtagaccgatgcaaagcggatataggccacctcgtcgatctttttcagttcctgcatggtcagctcgccgatgcgcacactggggatctcgcggtcgtaggagctgaacagagactgttcgatgctgctgacggcgtgctccagtgcttcatagctgacaggacgcttggcgcaggcacgcagcatggcattgagcagcttctgccggtcaaagggctcgcgggagttatcctttttaatgaccaccaacggcaccgtttccaccacctcataggtggtaaagcgcatatggcagttcaggcactcgcggcggcggcggatgcgctcgttgtcttcagtcgggcgggagtcgatcaccttggattcctccgcaccgcaataagggcacttcatcgtttgttcctccgccttagtctttctttttcctgcgctcgctccacagcacccatgccgaggtggaaacacacagagaggtgtacacaccgctgatcatacccatcatcagcgggaacgcaaaggtaaagatgctgtccagaccgtagagttttgccacgatgcacatgacgcccagtgccatcacggtggtgatggtggtgatcagggtgcggcgggcagactggttgaccgactggttgaccagctcttcaaagccagcctttttacccatcagggcgcggttctcgcggatacggtcgtacaccacaacggtatcgttgatggagtagccgaggatggtgagcatagcggcgataaagttgccgtccagtgcggtgcgcagcagcacaaaggtgccgaacaccaccatcaggtcgttgaccagcgccagcactgccatcatgccgccggtcagaccgccgatgttcttgaagcgcagggcgatatacagcagaatgagcaccagtgcaaacagcacagccaccaagctcttctgcaggaacttggtgcccatggctgcgctgacgttgctcagggacagctgggtgaactggttatccgggtagttctcgttcagggagtccagcaggttctccacctgctcggtggtcacagtctcggtgccgggcatggagatcttcagagtctggtcgccggtggctacgttctcgccggtctgcagggtcagaccggtgttttccagcgccgcagcagcggtcttttgcacagtggcttggtcaaagctgccctcgtaggacagggtgatcatagcaccgccggtgaactcggtatccagatgcacaccgaacaccacggcgcacagcagaatggctgccatcaggcaggcggagatggtcaggaactttttgcgcagggacacgaaatccaccggctttttttccgccttttcctgcacgggctttgcagcaccgtacagccacgggttgcgcagtgccttgatggcggctgcaccgcggatcatcacacgggtagcgaatacaccaaacacgaagttcagcagcacgccggtaagcagcgtataaccgaaggcgtagatggtgcctgcggtagaggggccgaaggcaaagaacacaaagtgcagtgccttggcaaacaggccatccgaggggccgaaggcacccatgagcacgatggccacgatgacgatagtcacgttgccatcaatgatgggggtcagaccgcgggcaaagccgctcttcagggcgccgtccagagatttgccgtttttcagctcctctttgatgcgctcggcggtgatgacgttggcatccacgcccatgccgatggccagaatgatacctgcgatgccgggcagggtcagggtaaagctttcaaataccgggaagtagccggacacaaaggccagcgtagccgccacctgaccggccagcgcgatgcaggccagaaagcccggcagacggtacagcaccgtcatgaacaccacgatgagggcaaaagcgatcagacctgccagcaccatggcaccaaggctgttttcgcccagactggggctcacggtagagtagctgtccacgctcagggcaaagggcagcgcaccggagttgatctggcgtgccatcttgaccacggcatcctgcgtaaagggattagaagccgaactggtgatgatggcctgtccatcggtaatggcggtgttgacggtggcggtgctcacgttctcgtcgtccagccagatgctgatgctgcccttatcggcggccagcttggtggtggcatcgccaaaggccttggcaccctcggtggtgaacttgagggcaacgtaatactctgagctgccgccgttgctcacagcgccgtactgcgccgaggcgctttcgaccatggagccgtccaggatcagctcaccgtccttgctggctccctcgcggaaggtcaggtaggcggtggtgccgatctcctgaatggcggactcggggtcaaagtccgtctcgccggactgccacgggaactccaggatcaggctgtcggaattgttgtccacatacagctcgtagtccgtcacgttcagcgcgaccagacggttctcgatgaccagacgggcggcatccagctgctcgtccgtggcatcgtagccatccgagggcacaaaggtgacgttgacgccgcctttgatatccacaccaaagcggatatcctttgcacctttgatataggtggtggtcacatcgccgtattttgctgccacgccaaaaaaggcggtgtagacaaatacaacgatcagcagcgcggtaacgaccagctgccatgctttgccttttgttttcataaatcagggaacctccaaaagcggcggctgtgcagccgcagccgtttttgttgtgaaccgcaagttttgccgacggctcctctcctcacagagcagccgtcgtgccggcctttctgtgataaaactcccctgccagccctgcaaagagccccgcagaggagaatatacaagttatttcaagccttaggccatatcagccagcagcttttccacaacggccagacgcacacagacgcacagcagctcggaagcggtctccacctcgtccagactggggtaagtgggggcaatgcgcagatgagagtcctgcgggtccttgtggtacggataggcagagcctgcacctgtcagcaccagacctgcatccttgcacagttctgccacgcgcttggcgcagccgggcatgacatacaggctgatgaagtagccgcccttggggttggtccagtgggcaatatcgccgcagggggtgaggttggcggcaaaggcagtcttgacggcatcaaagcagggcaccagacggcggcggtgctttgccatgtgtgccagaacgccctccttgttcttcaggaagcggacatggcgcagctggttcatcttatcgtagctgatgatcatcactgcaaagcgcttgcacatatacttcatgctgttgtcgctgcaggcaatggcagaaacgccggcacccgggaaggtgatcttgctggtggaagtgaacatgaacacgcgatcctgcgtgccgtacttcttgctcacgttcagcagaacaggagtctcgatgatctcctcggtcaggtgatggacgatgtaagcctcgtcccagaagatcttgaaatccggggctgcggtcttcatcttggcaaagcgctcgatggtctcatcgctgtaggtgtagccatcggggttggagtactgcggcacacaccagatacccttaatggtatcatcctctgccaccagcttttccacaacgtccatatcggggccgttgggggtcatgggcacgctgatgagctcaaagccgaactcttcggtgatggcaaagtgacggtcatagccgggcaccgggcagaggaacttgcgcttctccacctgagaccacggacagggagactccgggaagccaaacacataaccgatgttgatgaggttatacatcagctgcaggctagagttgccgcccacgaacacctcgttgggctttacgccgaacacatctgcaaacagggcgcgggcctcgctcagaccctccagctcgccgtagttgcgggcatctgtgcctgcatccgtggtgtagtcggtcatcttcagcaggtccattgccagatccatctggtgggggccgggcttgccgcgtgccatattcagcttcagaccctttgcctgaaactgcttgtattcctcttccagcgctgccttttcagcggtcagcgcatcgcgatccatctcgtgataatttgccattgaaaacacactcctttatagtacttcctgttacccagttatatggctcgtcttttgcggtatgcccctgccagagagcacatgccgcacgctccacattttactattatagtacattttcctgtcagaaacaagaatttgaaagcaaaaagccctgccaaaagcaaaaagctttcgaaacagggctttcaggcgggtgcgctcccctgctgtgcggcaatgccgtcagctgagagcggcctgatttttatagcgtttgcgcacagcgccgtattccagatgtgcttcgccgccctccacagtgtcctcgtccacggtcacgcggatgatggtggcatcgctgggcacctcgtacatgatgggcagcagaatgctttccatcacgctgcgcagaccgcgggcaccggtcttgcgctcgatggtcttgcgggcaatggcgtgcagggcttcgtccgtgaaggcaagctccacgttatccatgcccagcagctctttatactgcttgaccagactgttgcggggctccttgagcacgcgcaccagcgcatcctcgtccagatcatccagcacagtgatgaccggcagacggccgatcaactccgggatcaggccgaacttgaccagatcgtggggctctaccttgcgcagcaaggcgcgctcggcctcggtggagttatccttcagcgcactgccgaagcccagcgcggacttatcggtgcggcgcaggatatacttgtccagtccgtcaaaggcaccgccgcagatgaacaggatgttggtggtgtcgatctggatgaactcctgctgcgggtgcttgcggccgccctgcggcggcacgttgctgacagtaccctccaagatcttcagcagtgcctgctgcacgccctctccgcccacatcgcgggtgatggaggggttttcgctcttgcgagtgatcttatcgatctcatcaatgtagatgatgccgatctgtgccttctgcacgtcaaaatctgccgcctggatcagtttgagcagaatgttctccacgtcctcgcccacataaccggcctcggtaagggtggtggcatccgcaatggcgaagggcacgcccagcatcttggccagcgtctgggccagcagggtcttgcccacgccggagggacccagcagcagcacgttggacttttgcagctccacgtcgccgcccttgccgctgaggatgcgcttatagtggttgtagactgaaacggacagcacacgctttgcctcgtcctgaccgatgacatactgatccagaccatccttgatctcggccggggtcatgatgttgatatccagatctgcggcagcgggttggacatgggcgcggcttgcgcttccgcgtcccggacgggcgcttttgggctgatccggcttgtcagagagcagatcgtggcacaggccgatgcactcgctgcagatattgaccccggggccaatgatcatgcgctccacttcgtcctgatgcttgccgcaaaagctgcaaaccagatccttttcgtttttgccggaattgttatttgccatagctgtttttccttatcctggatagattatagcggtttaccggtgggcaatgacctcatcgatcaggccgtattcctttgcctgctgcgcggtaaggtagttgtcgcgctcggtgtcctgctggatcttttccagcggctggccggtgtactcgctgagcatccggttcatcttatcgcggatatagaccatgtgctcagcatggatcttgatatccgtggtctggccggaaaggccgccgccctgaccgccgatcagcggctggtggatcatgatctcggcgttgggcagcgcaaagcgcttgcccttggtgccgcttgccagcagaaatgcgcccatagaggcagccatgcccatgcagatggtggaaacgtcgcacttgatatactgcatggtatcatggatggccataccggcactgatggaaccgccggggctgttgatatacaggctgatgtccttatccgggtcctgcccttccagatacagcagctgcgccaccacaaggcttgcggtggtatcgttgacatcctcgctcagcacgatgatgcgatcgttcagcagacgagagaaaatatcgtaggaacgctctccgtgcgccgactgctcgacaacgtaaggaacaaaactcataaagttcgcctcctgaaatggtttaagtttattggcaaaattgaccgatacgggtccccttgtaaagttcagccgtaccggtcaattttaacaacctttgataaaacgcctgcggcgctttacagggcccggcactgattactcagcgtcagcagccttctcagcctctgcgggcttctccacgatgttggcgtggctcttgatgaagtcgatggccttggtgcgagccagatcctgcttcagatcctcgaggttgaccagctcacgcaccttgtcctcttccatcttgtactgatcagcaatgcgcttgatctcggcattgatctcgtcctcggaagcctcgatgtgctcagcagcagcaacagcctccagagccagaccgatcttgacctgcttctcagcctgcggcatgaaagcggcgcggaactgctccatggactgacccatatacttcaggtagtcctccagacgcagaccctgctgctccacacggaaagcaaagtcgttgaccatctcgtccatgcggacatcgtacatagcctgcgggatctcgccctccatgctctcgatgacctgatcgaccagagcattctcgacagccagatcatcctgcttgtccagctgctcctgattgttcttgcggatggaagccttgaactcgtccagagtatcgtactcggagcagtcctttgccagctcgtcatccagagcgggcagctccttgtacttgacctcgtgcagcttgatcttgaagacagcagccttgccggccagttcagcagcctgatactcggtggggaaggtgacgttcacatcgaactcctcgccggcagagtggccaacgacctgctcctcaaagccggggatgaagctgccgctgcccagagtcaggttgtagtgctcagccttgccgccctcgaatgcgacaccgtccacaaagccctcgaagtcgatatcagcgatatcgccattctgagcagcaccctcacgggtcagctcacgggcgttgcgctcctgcacacgcttcagctcagcgtccacagcctcgtcggtaacagtatggacagtcttttccacggtcagaccgttgtagctgccaaccttgacctcgggcttcacggcgaccttcacggtcagggtagcgccctctgcctcgctggcggaatccacggtgacctcaggacggcccacgggctccacaccggcttccttagcggcagcctcgaaagcctccgggaacagctcattgatggcgtcataggtaaagacgtctgcgccgtacatcttctcgatcagagccttgggagccttgcccttgcggaagccctgcacagggtacttcttgccctcttttttgaaaacatcggcaacagccttcttgaaagcttctgcgtcgatggagaactgcagttctgccatgctcttctcgagcttttcacacttgatgagattcatttgtttatcctccactcaaatattctattgctcagggcaggaagtttttgcccggggcaaccgcgcaccacgtccttgctgtatgcacacggaatgcggggacgcgcgcgctcaattgggtgcaacaatcgcgtcaaaacttattatagcacgctctggacacaattgccataccaaatttttaaattttgtcgtttttgcccttttctatcaccgttaattgatgcggtaggggcagaaacgcaggccatcggcacttaccagcttgtaccggatgccgtccacctcgccctgtacggcaaaccggatggcgttgccatgcagatgcccgtagaagcaggtcttgatgccgaactccttcagggtggctacgatctccggggcactggtgccggtgtagaccggcggatagtgcaggaacaccagcttttccagcccgggctccgctgcctgcaagctcatgcgcagacggccgatctcgcggttcatcaccttttcatcatggggttcccccacatcgaacagccagccgcgggtgccgcagatggcgtacccctccacactgtaagaattgttgtgcaggatatgcagggtatcaaagccctcggccttgaggtaggcgttcatcttgttggcggtggaccaccagtaatcgtggttgcccttcatgatgatcttctgcccgggcagctgctgcaaaaaggcaaagtccttgcgggtatcggtcaggcgcatagcccagctgatatcccccgccagcacgatggtgtcctgcggggtgatgagcttgcgccagtttttctccagcctgtccacgtaatcgttccagccgggaaagatatccatcggcttggatgcgcccagagaaagatgggggtcgccaagcacaaaaagtgccatagtctgtttactcctgttctgtctgtccgcagaagcttatgcctgatagcccagcgccacctcggcgatctgttccggggcaatgaccgtatcaaagcgctccggcttgctgcgcagagcggcaaggcttgccggtgcggcatgaccggtggcagcctccagctgctgcatggcttcaaaatcgttttccggggcagctttgcccagtgcgctcagcacactgcgggggaacttgaagggcgatgcggtggaaagcaccaccatgggcacgccctgacgctttttctgtgcagccacatggaaagccacagcggtgtgggtatcgcacaggtagccatccttttcgtagcgggcacggatctcccctgccacctcgtcctcgctgctccagccgcaggagaaggtctgctgaatagcggccagcgtctcgggacggacggtgtagctgccggtggcagccagctgctgcataaagcccgccacctcggcatcgctgccggtcacatggtacaacaggcgctccagattggaggacaccagaatgtccatgctgggcgaggtggtcttgaagaactcccgctttgcggtgtaagtaccggtggtgaggaaatcggtcagcacgttgttctcgttggaggcgcagaccagcttgcccacaggcagacccatctgctttgcgtaataaccggcaaggatatcgccgaagttgccggtgggtacgcagaagtccacctcgtcgccaaaggtgatcttcccggccttgagcagctgggcgtaggcggcaaaatagtagacgatctgcggcacaagacggccccagttgatggagttggcactggaaagacggatattccgcttttccagctcggcagcgatggccttatcgccgaacaccttcttcacgccggtctgggcatcgtcaaagttgccgcgcacggcgtacacggcaacattcgcgccctcctgcgttgccatctgcaaacgctggatctcgctggtgccgccggtggggtagaacacagcgatctccacaccggggatatcatggtagccgtccagcgcagccttgccggtatcgccgctggtagccacaaggatcagagtcttttcagtgcggcccaggttctttttggcttctaccaacagcttgggcatcagctgcagggcgtaatctttaaaggcgcaggtcgggccgtgccacagctcaagggcataggtgtccccttccaccggggcaagatagcctgccttaccgccgaaagcagcgccgtaagtgctgcgggtggcgtcggtcaggaaagcggggtcgtaatcggtcaggtactcccgcacaacggcggctgccagcgcggggtagtccagcccgcacagagcttttacatccacctgcggaaaactttccggcacaaacagaccgccttcatcggacagcccctgtgcaattgcctgagaagaggttactttgcggttctgatctctggtactgaaaaactgcatggtcatcgctccttttcgccatggaacgtgccgggcacgttcccggttgtacggcaaaaccctcgttttgcctcatacttcccaccggtgccacggtttctgcctaaggtgtatctgaaaacaaagaaaatgacggatatttcgcaagcacaagcgggatttaaggcaaatagccgcaggaatcctttgtggatttcaaggctgtttaacgcaaaatccaactgtgcttgtagaaatagactaaattttcgacttttcagatacacccttaggtctcgcagagaaaggcaccctttataatatgtaccatccagcgcccgctgtcaagaggaactacctctgcaacgtcaaaacgcaccggttcttcgctttggccggtctgctgtaaatacccttgtgcagcgcagatcagccggtgctgcttggccgggtctacggcggcagcagggcgctgcagcatcccttggctgcgggtctttacctcgcagatgacgatggtgccatctggctccctcagcacaagatccagctctcccatgcgggtatgataattatgtgccagcagctgcgcgccctgtttctgataccagcgggcagcggcagcttctcccctgcggccggtctcggcgcggttcatttaccgctctccggccagtagccctgctttttgaggaagctgcggcggtagaacggctggatgccgtactgcgcgatcagctcatagtgcagttttgtggggtagcccttgtgctttgccagctgatactgcgggtactgcttatccagttccagcatatagcggtcacggctgaccttggccagcaccgatgccgcgccgatgctggcgctggtggcatcgcccttgaccaccggctgtgccgggatctgcaaacctgcgggggtgcggtttccgtcaaccagcaccagattcggcacgatgtccagctgctccaccgcctgctgcatcccgcccatggtagcgttcaggatgttttcccggtcgatgacctccggccccacaaaaacgatgcggtaggccagcgccttttcgcagatctcatcaaacagtgcttcgcgctttttctcggtcagctttttggaatcgttgatgccgtacaccgggttttccgggtccagaatacaggccgctacgcaaacagggccgcaaagcgggccgcgcccggcctcgtccacaccggcaaagcagccgtactggctgcgcacctcggcatcaaaggcgtacagcggagccgagatctcctcatccgagcggcgcttcattcctcgtcctcctcggcaaaatcggtcaggtcatcccgctgcggcgggcgctccagagagatacgtccccacttgcaggcgcggaactcgtccaccagcatgatagcgcagcgctcggtgttcacctcgccgccgcgcaccagcagcccacgcttgcggccgatggcctccagcagctcatagggcggcagcgccagcgtttcggcatccagcttgtagcgctgtgccacaaggtcgggatagttgcggcgcacctcgtccagcaggttcatggccaattcttccacatccagaatgtcgtccttgatggagccgatgaaggccagattagaggcaatggtcttggaatcgaactttttccacagcacgccgggcatatccagcaggtcaaacttttccgtactgacccactgcttgcccttggtcacgccggggcggtctgccgccttggcgcgggcagagcctgcaaaggtgttgataaaggtggattttcccacgttggggatgccgcacagcattacctgcgttttggcaccgcccatgccgcggttctggcggcgctccagcaggccggaaagttccttttcaatagccgccttcacggcgtttgcgccgcccttctgcttggcgctgatggccacgcagccggcatctgcagcgtggaagtagcggatccactcctcagtcacagccgggtcggcaaggtcggccttgttcagcgcatagagctttggcttgcggtcggtgatgcgctcgatctccgggttcaggctggaaagcggaatgcgcgcatccagcagcacaaggctggcatcaacgtgctggatctcctgctccatcatgcgcagggtcttggtcatgtggcccgggaaccactgaatattgtactggtttgcaaaccgggtatccatttcgttcattttaccaccccaaaatctgtaaagggcataaagcacagcagcaccttgcccagaatatcacgctcgtcaatgcagccgacataggaggagcggctgtccagcgattcgttgcggttgtcccccattacaaacagggtgccctccggcaccgtgaacgggaactgcacatcgtagcccagataggtaggggctgcaatgtagtcctcctgcaaaagttcgccgttcaccgtgaccgtaccggcgtcgtagtcgatgctgatggtgtcgccgcccttggcgatgatccgcttgaccaacggcttaccgtagacggtgtagctgtccacgataaccacatcgccccgctgcggggtgtagcctgccgcccagacaatgagcttatcgccgtgggtcagggtgggcaccatagagcgcccgtccacctgaatgatgcggaagaaaaacgaaaagatcagtaccagcaccagcgctgcggagataagtgcttcgtaccattccagtatgccctgtccgcgcactgcgggggcagactgctgctgtttttccatagcttagccaccagcctttcctgattttacacatacgcccgggctttgaaaaagaaaaaagggacaacaagttgtcccttttctcccggtttcaaatcggggatgatcaaatatcgctcttgaccttggcagccttgcccgtacggccacgcagatagaacagttttgcgcggcggaccttgcccttgcggacaacagtgaccttctcaacgaaggggctgttgacggggaagacacgctcgatgccgacaccgtaagccacgcggcgaacggtgaaggtctctgcaacgccgccgtgcttcttagcgatgacagtgccctcaaaggcctgaatgcgctcacggtcgccgtccttgatacgaacatcaacgcggacggtatcgccaacgttgaactgaggcttttcagccttgatgctgccttcagaaataatcttcagtgcgtccatttttgaatcctccatttgtttttagacgttcatgcacggcatagccgtcagaggaccgcccgtttaatgataaatacttgtcattaaccccgctgtggtctcagcggacactaacgccctaataggatagcacaaaaccggcttgaatgcaagcaatttggcgaaaaatcttgcaaaaattttctgttttgcctgatagacggacttttgcgccgcttcaggcaaacagctgccggtctgccgtcaaaaatttggtgcgcaggatattggcgcttgcggctggcaggccgaacttttcttccagaaaaccggtgagcagcgaggggttcaggttcagttcctgcgcagcgggcaggcaaagttccagctgcacggtgtcccctgctgtggtatagccaagctgcgggatatgctctttaaggtctatgatctttttgccgcgcttgctgtgcttttccacaggggctgtctccagcgcattatactgctccagcaccgtagcggcagccgccgggtagctgatgcggtaacaggcaaaggcgatgctgtccgccttcatctccaccggagctacccgggtaacatggataccggcgggcatgatggcgttgagggcggtctgccactgggcaaaatccggggcttcggcttcggtcttgacgtccacgcactcgcactcactctcctgccccagcgagagcggacaggcaaaggtcatgtagatatgggggttaaagccaagcgtatgccacaccggcagaccgctgcgcttgagcacccgctgcatcacccgctgcaagtccagcagggagatataggaggcttcatttttcttttcaaacgagattctgactgtaatcaaagcagggacctcctaacagatggttggcaccgcaggcgttgcaggcacggttgcagggcggggtggtctgggcagccagagccttgttgtactcccgcaccagatactcgtgggtgatgccgtagtccatatgcgaccacggggtcacctcgtccagcgcgatggggcgctggcagtagaaggcggggttgatgcccaggtctgcaaaggtctgcatccaggtatcgtacttgaagcactcctcccagccatcgaagtagcagccgcgcttataagcctccacgatgaccggggcaaggcggcggtcgcccttggcgaacacgccctccaaaaagctggtggtactgtcgtggtagttcaccttgatcttgcggctgtgcacgctttccagcaggtgcttctgcttggcctgcagggtctcggcggtatccatgggcacgaactggaagggggtgtggggcttgggcacaaagcaggcgcagctgatggtcacctgcacgccgcgtcccttggcgtggttcgtgttcttgtagtagaggtctaccaccttctgggcggtctcggcaatgccctcgatatcctccatggtctcggtgggcagacccatcatgaagtagagcttgaccgaagtgtagcccgcgttgaaagcgatggtgcaggtcttttcgatctcgtcccaagtgacgtttttattgatgacgttgcgcagacgctgagtaccggcctcggcggcaaaggtcaggccgctcttgcgcaccttggtggttttttcgatgaggctctgggagaagttgtccacacgcagggagggcagcgacaggctgacgtgctccttgggtgcccactcgttcagatcatccagcagctcttccagctgaccgtggtcggaggtggaaaggctggaaaggctcagttcctcgtaaccggtgttggcacacagatcctgcgcggccttgttcagcaaactggcatcgcgctggcgcatggggcggtacaaaaagcctgcctgacagaaccggcagccgcgcacgcagccgcgcagcacctcgatgctggcgcgatcctgaatggcacccaccataggcaccacaaagttggtgggcggggcgaactggttcagatccttgatgatggccttggtgatgcgcgccggaatgcccggctcgttgggggtgatggcctttactctgccgtcctcgtagtaggtgacatcgtagaaagccgggatgtacacgcccgggatctttgcaatgttgagcagcagctgttttttggagatgccctcttctttcgccttttcgatctcagcgcagatggcgggcagctggttctcgccctcgcccagctggatgacgtcaaagaaatccgcgataggctccgcgttgcaggcgcaggggccgcccgctacgatcagcggccagcggtcgtcacggtctttggaatagaacgggatgccagccaagtccagcatggcaaggatattggtgtaggaaagctcgtactgcaaggtaaagcccacggcgtcaaaggccgtgagggggtctttgctctccatggtgtacagcggcagctgcaggcgctccatctctgccttcatatccagccaaggcataaaggcgcgctcgcaccaccagttctcgtggctgttgagcagttcgtacaggatcttttcgcccagaaaggacattcccacctcgtaggtatccgggaagcagaaggcaaagcgcacatctaccttatccttttctttatagatactgccgggctcgccgccggtatagcgaccgggcttctgcacccgtcccagcgcttctttcagtttgggatcaaacatcgggtcctccataaacaatccgttttttgcgttctttttattttaccccaaatgtgccggttttgcaatcgtttccggcggtttgtgtacactttccgtatttttgccgccagagtgcccctgcgcacgctgccatctgtgcgccatccagcggcgggattggcaaaaggttgaacagccccgtcagcagattcgccgcccagaacgcgctgtctcggatagtgacagtctgcgcaagacgcaccgcccataccccggcaagggcaaaattgactgcgggcccggcggcagcaagcacgaacctctggagtggggagaacctctcccctgccgtacgcatacaaaaaccggtcatggtcacctcgatgaccggcagacgcctttgctggatgcagtagacaaggatgtgccccagctcgtgcaaaacagccgccagcagtcccagccgcagaaagccactggcatcaaagtagagcagcaggtacaccacaccgcacagcagcaccgggtcccggaatacaagcttccccacccgcagccggttcacggggtattctccaacagggcggcggggtcgcaggcagcgccctgctgccacagttccagatgcaggtgcgcaccggtggcgcgccctgtctgccctactgtgcccagcgtctgcccggcctgcaccacctctcccgggcggacatagaggtattgcaggtgtgcgtagcgggtctcgcagccatccgggtgcaggatgcgcagatggttgccgtagcttgggctgtatgccgccgcagtcactaccccgccctgcaccgcttgcactgccgtgcccgccgcgcaggcaaggtcaagtccccgatggaacgcagacttgccggtaaaggggtctgtccgcgcgccgtaggcgtccgagacgcgccacgccgtggtatccagcggaaagcagtgcttttgcgtgttccgggcagcctgcaccggcaaagctgccagcagacagagtgccagccctgccaacacaagtgccatgatgccccaccgccgtctgcgtatttttgctgcctgtccgctccgttttgcccgcatacgcccgccctcctatcctgaaaagtgtatgcacaagaggcagacaggagaacacaaacaaaaaagcagagccgccgcacaaatctctgcgcagcagctccggttttggtttatatgattttacagctcagcgccggaaaaagttcccgatgcgttccagcaggctctttttcttgggcgcggtgacagcaggctttgcagccgggcggggtgcagcgggcgttttcggcgcgggctgcgcagcgcggggcttgttgttcagcatctgttccagtgtctcgtagtggtcgggctgctgcgccgccggggcggcattctctgccttttccggtgcgggctggaacacatggggcggctcctgtttgagctgttccacggtgacttcctgacagactgccgccggtttttccgtttccggggcggaggtggtgcacttccacggctcggggcgctgccagtcgttgcgcagcagctcgtacatacccatctggccgttgaccagcggctcaccctcggcgggcttcaccttctgatagctgccgctggcatccatgacccgggcgttgacgttatcccgcagctgcagctgaaggatatcggtgagcttttgcaccaaaacaggatcctccacccgcacgcctacctccacacggcactcagtattacgggtgaggaagtcaccggaagcaatgtagatgcgggtgtgggtgccatcaaagaagctgtaaatgcggccatgctccagataccgtcccaccagactgcggatgtgcagattctcggtcttgccgggcacctctgcgcgtacgcagcagatgccgcgcacgatcatatcaatgcgcaccccggcgcagctggcttcctgcaatttcaggatgatatcccggtcgctgatggagttgtttttcaggatcatggaagccgggcggcccatgcgggcggcagcgatgatatgatccatctcgtccagcagcacgctcttgaagcgcagcggggcaaccagcatcttgtcgctttcctcggtgagctgctgcacagccagattgcggaacactttggaggcttcctcgccgatgcgctcgtctgcggtgatgaaggaataatcggtatacagttcgctggttttttcgttgtagttgccggtaccgatctgggtaatgtaggagtagccctctgcgcccttgcgggtgatgagggtcagcttggagtgcaccttataatcctcgaagccgtagatgacggtgcagccggcgctttccagctgcttggaccagtcgatgttgttctgctcgtcaaagcgggcgcgcagctccaccagcgctactacttccttgccgttttcggcggcttccatcaacgcctgcacgatctgggactcccgcgccatgcggtagagggtcatcttgatggagatgacatccgggtcctgtgcggcctttttgagcatggtgataaagggacggatggactggtacggatagctgagcagcacgtcatgcttctgcacctcggtggcaagatcatagtccggcggcggcagcatggggcgtgcgggggtgtaaaacagcgccgggtgaccctcggtctccatgcggccggaaagcttaaagaagaagctcaggtccagcgggctcttttgcaagaacacccgcttgcgggtcagttccagacggctgcacagcagccgctccacctccggtgcgggggcgggcgtgatctgcaaacggacagcggccagcttgcggcggcgccggagcagctcggtcatgatctcgcgataatcaatatcgtgatccatcatgccctcttttacatcgatatccgcgttgcgggtgacccggaacaggcatttttcctgaatggaatccttgccgaagatgttggacgcatagtgcagcaccagctcttcggtgagggcaaactgcacagcgccgtcctttttgataaaatgcatccgctccatctggctggagatgggtacgatgccaaggctctgctcctgtgtgtgtttttccttgagcagcacgccaaggtagatctccttgttgcgcaaaaacgggaacgggtggcggttatctacgatctgcgggctgaggatggggaacagttccgactggaagtattttttccagagatgctcttcttccttggtcaggtggtcgaaatccaccttatggtagccgttctctgccagattttccagcgcctttgcgtagaatttatcgcattcctcctgcagctgcgccgttttgggcataatagcggccagctgctcggcggcggtcatgttggtcttgttttcccgcttttcctttttggtcttgctctgctcaaggtttgcgcgctcctgcaaggagcccacgcgcaccatgaaaaactcgtccagattggagccgtaaattgccagaaacttgatccgctcgcccagcgggacgtttttgtccttgcccagcgccagaacgcggcggttgaaatccagccagctcagttcgcggttgataaagatcgattcgtcactcataacaatatatctccgtatttcctctttgaccaaggcagaaagcgggctgcgccctagcggacatacgcctgccctgcccatgaatccaccattgcgcgggtaatgcccggcacctgcgcggcatcctccacctgtgcaaacggaccgtactgcgcccggtagtccagaatggcctgtgcattgcgtgggccgacaccgggcagggtgcacaaggcatctgcatcggctgtgttcagctccacctgtgtgtacgccgccagcgcctttgtgtccggcagtgtctgcggggtctgtgcttgcagcggcactgcaaaccggaacgccagccctgcacagatccctgcggcggcaaggcacagcagaagaaacagcccttcgcggtgcttttggttcggcatagatcctcctctccattctacctgattttttgctaaaaagaaagccctctgcgggaaaatagcagagggctttgcacaaattttacacggatttttcagcagcacgcaccatgcggtacaaaacctccacagcagcgccaccggcggcatccgtcagggtgatctgctcggcggcaaggcgcagctctgccggggcatcggcggccactgcgctgtgctctacagcctgcaccagctccagcatgggctgaccgcccgccagcgcaaggacctgctccgcgcccacctgcgccatggcgcagacggtgtccagcatttcccggccagagattcgcttcggggtgagaacaagagtgtccggggcgatacgctcgcccagcagggcaacacgatccccgatggccttttcagccagcgagatcaggggtacagacttgctgtcctgatacagcagcacccgcagcacctgctcggggcggatgtcggcggcgtttgccagcagatacggggtccactcctgccgcagatggcgctccaacgcattgctcatgcgcagcacccgggtggtgccgtcctgcatctgcacggcgacacccacgccgggggcatccggcaggcaggtaaaaagctcctgctgctgggcaaagctgcacaggggcacccggttgccgtcggcatagtggtaggccatggtgccgccgcacaccagcgcaggcgctgccagacgcacgctgcccagaatggagcgcacggcgcgcggagagcgctgcgaaaaaacagtcagtctgccgccgcggctgctgaacaactgcaaaacatcccgcaccacctgggtcagattgccatcctcgcccagcagcaggttatccagatcacagagcaccagagtggatgccagagaatcgttcatgtgtttttcctcctgagtgttgcgagaaaatgggtaaagtagtccggcagctcggaatcgaaccgcagctgctccccggtgatggggtggataaagcccagcgttttggcgtgcaggcactggccgtgcaggctggtgatgcagttgtgagggccgtacaccgggtcccccgctaccggatggtggatggaggccatgtgtacgcggatctgatgggtgcggccggtctttaggcggcattccagcagggtgaactcgcccagccgctccagcaccttgtagccggtgtaggcgtacttggtgtgaggttcggtggccgggtagactgccatttttttgcggtcggtcttgctgcggccgaggtttgcttccacaaagccctcgtcctgcgcaaagccgccgtagaccaccgtctgataggcacgctccacgctgtgcaccgccatctgctgggaaaggccgatgtgggtggcgtcgtcctttgccaccaccagcaggccgctggtgtccttatcgatgcggtggacgatgccggggcggatctcgccgccaatgccggaaaggctgcccttgcagtgccacagcagggcgttgaccagcgtgccgtccgggttgccgggtgcggggtgcaccaccatgcccttgggcttgttgaccaccagcaggtgggcgtcctcgtagacgatatccagcgggatatcctgcggcacggcctcgatgggctttgcgtcagggatctccagcagcacggtgtctcctgccttgagtttcaggcttttggccacagccttgccgttgcactgcacatgcccctccgccaccagcgcctgcagcgccgagcgggacaggccggtgtcctcgccgctgagaaagcggtcgatgcgctggcctgcagtctcctgctctacgataaattcacgctgttccatggtttattgctccttggcggcatcatcggcatggagctcatccagaaagatcaccagcacccacagtgccacgcccacgcaaacacagatatccgcaaaattgaacacagcaaaccgcatgaacagcaggttgatgtagtccactacctcgccgttgagcacacggtcgatcaggttgccgatgccgccgcccagcaccagcaccagcgctacctgctgcaagcgtttgccgcggctgcggaaaaacaggccataggccactgccagcagcgccgcactggtggcgatgatcaggaacagctgcttgccgctgagcagactgaaagccataccctgattgagcacgaaccgcagctccactacatgggggatgaacggcatagcgcctaccggctgcaacgcctgcaccgcccacagcttgatcagttggtcgatgccgaccagtgccgccacagccgccagattgaagagtacaaatgccattagctacctcgtttctgctataaaaaacggcgctccccggtcaagggagcgccgccctttttacaaaacagatttgtattgatgcgggacgcttatgcttccacaacgctggcgcagcgtgcgcacagagtggggtgtgcaggatggctgccgatggaagcagagtacttccagcagcgctcgcacttgtcgccggtggcgtgtgcagctgcaacgcccaagccctcgacagcgctggcagcgccgccctcgcccttgaccagctccacatgggagacgatcatcaggtcggccagctcgtccatggggatgctgttcagcaggtcatagacggcatcattgcagtacagggtgacagaagcttccagagaagcgccgatgagcttttcagcacgggcctgctccagcaccttcttgacctcgtcgcgcacggcgatgagctgtgcccactttgccttgaaagcatcgtcggcggcgtactgaccggccttgggcatctgctcgaacaccacatacttgttcatgccctcggtcttgggcatgaagtcccagatctcctgactggtgaagcacaggatgggggcaatgatcttatccagagcgacaaggatcttgtacatggtggtctgggcggccttgcgggctgcgccgttggtgcagtacagacgatccttggtgacgtccagatagaagttggacatagccaccacgcagaagttgtacacggcgtggtagaccttgttgaagtcgtacacggcgtagcctgcgttggtgttgacgatcaggtcatccagcgcagccagtgcccagcggtcgatatcctgcagctggtcgtctgccacacaatcggtgttggggtcaaagccgtccagattgcccagaatgaagcgggcggtgttgcggatcttacggtaagcttcgctgagctgcttgaagatgttcttgccggcgcgcacgtccacggtgtagtcggaagaagccacccacaggcggatgatatcggcgccgtagtccttgatgatctcgctgggctccacgccgttgccggcgctcttgtgcatctgcttgccctgctcgtccacaacccagccgtggcacagcacggacttatagggtgcgcagcccttgcttgcaacactggtcagcaggctggactggaaccaaccgcggaactggtcgccgccttccatatacatatcggcggggaaacgcagctcgggacgctcgtccagcacggcggcgtgggtagagccggagtcgaaccagacatccatgatgtcggtgtccttctcccactcggaagcgccgcacttctcgcacacttcacctgcggggatgatctgctcggcatcgtacttataccatgcgtcagagccttccttgcggaacagggcgctgacagccttgatggtagcatcggtaatgtggtaggtgccgcacttcttgcagtagaaggcggggatgggcacgccccaagtgcgctggcggctgatgcaccagtcgttgcggtcacgcaccataccagtcatgcggtcatgaccccaatccggcatccaagtgacggtatcaatggccttgtacacgtcctcgcggaacttggcaatggagcagaaccactgctcggtagcacggaagatgatggggttgtggcagcgccagcagtgggggtactggtgcttgatgtgcacttgacccatcacagcaccggaggcagtcaggtcggccagaatggtcttgttggctgcccacacgcgctgcccagcgtacttaccggccagctcggtcaggtaaccgccgtcgtccacaggcacggtgatgggcacctgcggatacttctggcagacgttgaagtcgtccacgccgtggccgcctgcggtgtgcacgcagccggaaccgctttccagcgtgacgtggtcgcccagaatgacccagccctccttgggcaggtagacgtggttgtagcgcatcagctcgaactcagcgccggaaacaggctcgcccacgatctcgtagttctcgatgtggcaggcgtccataacgctcttgaccagatcggtggccatgatgtggtactcctcgccgatcttgacgaaggaatactcgaactgaccgttcaggcagatagcctcgttggcgggcagggtccaagtggttgtggtccagatgacgaagtaggtcttatccatggggatgccgtactttgccagcacaccgttgggatcctgcgagacgtggaagcgcacaaagatggaatcgcagtcgtcctcgccgtactcgatctcggcttccgccagcgcagtgcggcagtccgggcaccagtacacgggcttaaggcccttgtagatgtagcccttcttggccatctcgccgaagatctcgatctgacgcgcttcaaactcaggcttcagggtcaggtaggggtgctcgaagtcaccgataacgcccagacgcttgaactggtcgctcatgatgtcgatatgctcggtggcaaacttttcacagatctggcgcagctccagcttggagatgtccttctttttgtcgccgaccgaggacagagccttcagctcaatgggcaggccgtgggtatcaaagccgggcacatagggagcctgatagccctccatgttcttttcgcggatgatgatatccttgatgatcttgttcagggcagtgcccatgtggatattgccgtttgcatacggagggccgtcgtgcagaatgaactggggcttgccctcattgtgcttcatgagctggttgtacaggtcgttgtcgtcccaatccttgagcatgaccggttcctttttgggcaggccggcacgcatctcgaacagggtcttgggcagattcaacgtactgtcgtactgcgatttgttcttagccaatggtttacactctcctctatttttgcgttgggtgccttactcgctgaacttgacgccctgaaaagcatcatagtccggctcgtccggcttcatatcagcaggaggcgggtccagcttgagctggctttcgtcctttgcccagaaatcctcgctgctgtcagccgccttgtcgtcatcggcaggggcggcaggttcggtgattttggtcgtttcggcaggctgctcggccggagctgctgcatcgtcggctgcgggggcagcatcaggctgtgcagcgggctgctctgcggcagtctcctgcgcaggctctgcgtcctgtgcgggggcgtcctgtgcagcttccttggtttccttctggaactccggcagacggctcaaagactccacatggctgcggtacaaattgagcacatcggccttgaagcgggtgacctccagacggacgcggtcgtactcccgttcctccgccatacgcttctcattagcttcgttttcgatctcgtctgcgcggtcgcttgccttttgcagcagctcgttggcatcgcggatgatatcatcgccccgcagatttgcgcggtggatgatctcctcagccttctggtttgcttcgcggatcacgttttcgcccatgcgctgagcattgatcagcgcactcttgagcatatcgccgtcagcctcaaagctttgcagctcgcccttgagcttctggttctctgcggtcagatctgcgatctgcttgcgcagctgctctgcctgcgcatcgttctgctgcagctgctcctcgaccttgtccagaaaacgatccacgtcctctgtacggtagccgcggaggtttttttcaaattgtacagagcggacatcctgcggagtcagcatagtcatttcctcccatagcttttaatattgaaagaactcaatgatcgaacgatcttttttacttttcccgggcaatgcggtcagccggaagcggcccttgccgcgcacggtgaacacatcctgctcgtatacgggggcatggggcttttctaccggcagatggttgatctctaccctgcccgcttcgatcagctccgcagcagtaccgcggctgacgtgcagcatggcagaaagcaccgcgtccagccgcagggaggacacggtggcagtgagcagctgccgctccggcaccgggaaagccgggatctcttccggctccaaaagacgggtggacacctcgatgcgccccgcctggcacagctcccggcagataagctttgccgccggctccagcgcgaacacataggctgtgcccggcgcatcggcgggcagcaggatatcgcccagtgcttcgcgcttgagggcaagccccatcaggctgcccagatagtccttgtgcgccggaagcgccgcaccgggcagcgcccggcactgcagctgtacgcagcgcaccggacactcgccgtagctgtactccggctccagacaaagcacccggcgctcggcttcgggccagccgccgtcaaaacgccagccgtcccgtacaccggcacgccccagtgccgcccgggcaagatcctgttcccggtcgctgaggaacgcggagtaccgggctatgccgcgggaaaaagccgcatcggcaagatcctcgatatgccgcatgagatagcgttcctcatcgttgcgggcgggcacaaagccgcgcaccgcaccggctgccggatcaatagaatgcgccattgttctccagctcgtccagcaggtcacccatgatatccacgttgtacggggtaatgataaaggtgctgttggctacgcgcttgatctgaccgttgttggcataagccacgccggacaggaagtccaccagacggcgggagacctccttgttggtggactccagattcagcaccacggtacgcttgttgttcagatggtcggcaatggtgctggcatcctcgaaccgctcgggcttgaccagaaccaccttgagctgggtggtagcgtggatattgaccaccttgttctttttgctggtgccctcggcaggctcttcggtctcttcatccatcccgatgccgacgccgctgttgttgttcaccatctgggggccgtcatcgatgtactgatcctcgtactcgtccccttcacccatcaggccctttttaatgctatccagcaaagacataattatctgctcctttcattcgggcagcgcccggctgcctggcgttctttgcaaaaagaatgcaaatagcttttactattatctgattttttgcagcagatgtcaataactacaaaagttttccgtcatataaattttgtcccgagacgattatttcgtcataaagccttacctgactgacagaaccgtccgttcccttgggcaaaacaaggatgtaatccccttccgtgaccagcggatggtcagcatccacggggtcgatcttacagaagcgggcaatgttgccgtacttgacatacacgccggggatatagttttcgccctgcgtctcggcctcggtgccgtcctccttcaggtagtgcaccgctgcagcaggcacccgcagaccggtgctctccccggtgctgatgcgggcacgggcgtggttgagacacagcacgtcgccgttgatggaattgcagcgcagcacaaagcgggcaacatccttttctgcatcaacggtcacctcggtgacggtagcgcgcaaggcggcatcgctctggccgggaaagctgatctccactgccgtgcgcaagggcttgccgtccgaacccagcagcttttcggcctgctttgccgagcacacaccggcgtactgccagctgaacccggccaccagcttgcctacgcagccatccagcggcatctcggggtcagagtccagataggccatgagctgctccgggctctgcgccagaatgtccgcagcaccggcgttcagccgtccgctgctggcagcccggacaaagtagcctgtggtgggggcggtgatctgagtggggttgcccagctgggcctgcacggtctgtgcctgctgggcaagcagcgcgatctgatctgcaaagccggcggtatcgccggtggtgatccacagcttgttctgcgccagcagataggcatcggcactgctgtccacatcgctgtagcgggcggtgtccaatgcatccagcagatcgtacagcgcaccggagcgctccttgagcagaccgtccagctgggtggctgcggtattctgggagcgctgcaacagatcgatctggctggtgagctgggtcagctgctggcgcagcaccgcctgattggcgtcggtgtacagctctgcaacggcagtgcccgccgacacccgctcgccatccgagacaaggtagcccagattgccgctgccggaaatgcaggtctcgtcaaacagcagcacgccgtccgcttcaatggtatcggagatggtgatgggcagcgccgtttcgtagacgttctgggggaaaaggatgtgcgccgcctgccagcagacatacactgccgccgccagcaaaaaggtggccatcacaactgccagcgtggtgagcgcagagagcttgtggcgcggttcctgaggggtttccggcataaggatcatcctttcgataaaaagtcttgggtcaggcgcagggcggtctgccgcacgtcctcagccccggcatccagccatgtgaccccgtccatgtggcggaaccatgtcagctggcgcttggcgtagttgcgggaagcctgtttgagtttttcagtgcaggcatccagcgctgcagtctgctcaaaatacggaaaaaactctttataaccgatggcctgtgcggcggtgcggaaggcttcgcggttgcgccagacgtattccgcctcggctaaaagcccggcctccagcattttgtccacccgcaggtcgatgcggcggtacagcgctgcacggtccgggaagtccagccccagcacaaggctgcggtaggggcgctccggcggcagcgaatcggccttttgttcgctgagacgcttgccggtggcgtggtagtgctccagcgcccgcagcacccgcaccttattattggggtggatggcagcggcggcttccgggtccacggcttgcagttttgcgtacatagcttccgggccgatggcttccagttcggcggtcagctgctcgcgcaggccgtccggggctttttcggcggtgaagcgcaccccgtacaaaaggctctgcacatacagtccggtgccgcctaccagcagcggcagatgcccccgggcggtgatatcctgaatatactcccctgccagcgcggtgaaatccgccacgctgaaggtcttatccggggtaaggatgtccacgccgtggtgcgggatgccgcaggtctcctgcggggtgatcttggcagtgcccacatccaaacctctatagatctgcatggagtcggcgctgatgacctcgccggagaaccgctgcgccagcgcaacgcccagcgcggtcttgccggtggcggtgggacctaccacagccaccacggcagcttttgcattacacgatgcgtccaaactgcttttccaactcctttcgggtaagtttgagcacgcagggacgaccatgggggcagaaaggcggcacctcgccggagaggatcttctcggccagtgccataagctcctgcggggaggacttgtcccctgccttgatggcggcgcgacaggagatggagtgcagcacccactcggtgtgctcgttcagtgcgtcccggctgcccttgagcaggcggtcggcgatctctaccaacagatcctcggcgttctgcggctctacgtccgcaggcacggcgcgtagcagcacggtgctgccgccaaagtccgccacatccagcccggcgttttccagcaggggctggttttccagcagcgcctgcttttcctctgcggaaaggtcgatggcggcgggctgcagcagcagctggctgggcacattgccgtagttggcggcaagcttttcgtacagctggcgctcatgggcggcgtgcttgtcgatcaggcacagctcgtctccccgctctgccagaatataggtgcggaaaacttcgcccacataccgcagcggctcttctccctgcggtacatcaaagcccagctgctccggctgttccggctgttcgggttcttccggctgatagggcaccgtggcggcttcgatctccggggcggcgggtacggtgttccatgccgccatgtgatccagcagcgggtcggctgcggtgtccgtttccgggtgcacatccagctgcgcttcaccggcagctgcccggaagggctgcggcgcgggctggacttcggttgcatccggtttttccgggctgtggagggtgactaccggatccagaatgtcctctgcgggggcagactgccgccacgagggcacagcagcagccgcgcgggcaggccgtgcgggctgtaccgacggggtatctgccgtaaaagccggggttttcaccggtgtagcagcggggcgctgctgcgacggggcttcccagcgctgcgcgggcagcgtaccggggtctgcctgacccggaatgacggcggaaagtcctgtaaagtgattattctttacagcattttcgttctttgtatcgttttctttttcggatttctcatttttgtccgcttcaaaggtaaagcggcgttccccggtgccgggctgtgccagcgccagcttgaccgcatgataaacgacatcgaacacgtcgttttcccgggcaaagcgagcttcgatctttgcggggtggacattgacgtccacaaggtcggtgggcatttccagcagcaggatgccgcccgggaacttgccctgcatggtcgtgcccttaaaggccatttccatgcccgccatgatggtgcggttgcgcacatatctaccgttaatgtagaaatgctgcatactgcggctggcgcggcagctcttgggctgggtgatcagaccactgacccggtacaacccttcctcggagtgcacctcgatgaggtcgcggctgaactcccggccaagcaccgcataggcggcgctgcgcagctgaccatcgccgggggtgacatattgcagcttgccttcccggatgaatttgacactgacctccgggtggctgagtgccacatgacctacgttatctgccacaaaggtgccctcgctggagtcctttttgaggaacttcatgcgggcgggggtgttgtagaacaggtcctgcacccggatggtggtgcccacggcgcgggcggcaggctccctgccctgctcctcgccgccggcgatgcggtagcaggtggcaaactcgtccacctcggtgcgggtgagcagctctacccgcgccacgctggcaatggaagccagtgcttcgccgcggaagcccagcgtatggatgctgttcaggtcgtccggcttttcgattttgctggtggcgtggcggatgaaggccgtcgggatatactcagcatcaatgccggtgccgttatcgctgatctcgatcagctttacaccgccggattcaatgctgacggtgacctgcgttgcaccggcgtcgatggagttttccaaaagctccttgaccaccgatgcggggcgctctaccacctcaccggcggcgatcagttcagcggtatgcttatccagtacatggatgactgccatggtcttttccctcccctgtggttgattttatggtcagccgttcaggctgcccttgagggtctttttcagctcgtacaaaaagttcagcgcttcaatgggagtaagtgtttccacatccacggtctccagcttttccatcatctcgctgggcactgccggggaattgtactcctgcaaggcgtcaaaatccatctgctccaccttgtttttgggggcagatgcttccagcgtgcgcagtacctcgtgggcgcggcgggtcacgctgccgggcagaccggccagctttgccacctcgatgccgtagctgtcatcggcagggccgcgcacgatgcgccgcaggaaggtgatgtcctcgccgcgctttttgaccgcgatgttgtagtttttcacaccttccacggtgccttccagctcggtcagttcgtggtagtgggtggcgaacagggtcttgcagcccagtcctttggcagggtctgcgatatgctccactacggcgcgggcaatgctcatgccgtcaaaggtggaggtgccgcggccgatctcgtccagcaccacaaggctcttagcggtggcgtttttcaaaatttcggccacctcggtcatctccaccataaaggtagactggcctgcggcaaggtcgtccgatgcaccgatgcgggtgaaaatggcatccaccacgcccacatgacagctggcagccggcacgaaggagccgatctgtgccatcagcgcaatgagggcattctgacgcatataggtagatttgcccgccatgttggggccggtgatgatgagacagcggtcggtggtgcagttgagggtggtatcgttgggcacgaacatactgcccttgagcacctgctccaccaccgggtgacgtccctcggtgatggtcagcacatcgctgtcgtccaccacggggcggcagtagttattttccgcagcgacctgtgccagcgccgccagcacatccagctgggcaatggcgttggcggtgcgttggatacggtccagttgggcaccgatgctctccagcaattcgtcaaacaggcggcgctccagcgagataagacgctcgtgtgcaccaaggatcttgctttccagctccttcagctcctgcgtgatgtaccgctcgccggaggtgagggtctgcttgcggatataggtctccggcacaaggtttttgtaggagttgctcacctcgatgaagtagccgaacacatggttatagccgatcttcagcttggggatgcctgtctcctgccgcaggcgggcttccagctgcgccagcacccccttggtgttgtcgcggatggagcgcagctcgtccacctcggcatggtaacccttggcaatgacgccgccatccttgagggtggagggggcgtccgggtctactgcggcataaatgcgcgccttgatatcctccagcgggtcgatgctggcggcaagctcggaaagctccgggcagctgcagccctctgcctgcttgcgtaggccgggcagacggtcgcaggtctgggcaagggtgtagatctccttgggggtggcagagccgtacaccgtgcgggtcatcaggcgctccatgtccgcgatgtaatgcagttcctcggtcaaatcgccgcgcaccatggtctggcgcaccagtgcctccacggcgttcaggcggtggttgatgagcgagctggaaataagcggctgctcgatccagctgcgcagcatccgcttgcccatggcagtgctggtcttatccagcacccacagcagggtgccgcgcttttcgcgtcctcgcagggtctcggtcagctcaaggtttgcccgggtgaccggtgaaagccgcatgaactgggcttcgttgtaagtaatgacggtctttagccgctccacgcccttgatctgggtatcgtgcagatattccagcagcgcggccatggcaaagcgcaccagaccctcggcagctatgccggtggtctgcggccagtcgcggccaaactgctcttccagcgcagacgccaccagccccggcgcatagcgctcgtcctcgaccagctccaccgagcagttcatattcttcttgatgtaagcggtcacctcgcggcagtccagcagaccggggttcagcagtacctcgctgggatggtagcggcacagctcggtaatgaccgccggggcgatcttatccgccgtcagttcggtgatatgcgccgtaccggtggaaacatccgcaaagcacagaccggcctttttgcccttgaggtacaggctggcaatgtagttgttacggtcgtcctgcagcatactgctttcaatgaccgtaccgggggtgaccacccggatgatgtcccgcttgacaagccccttggctttagcggggtcctccacctgctcgcagatggccaccttatagcccttggcgatcaggcgcgccacatagccctcgtagctgtggaagggcacgccgcacatgggggcgcgctccgcaaggccgcactgcttgccggtaagggtaagatccagctcccgggacgccgtgacggcatcatcgaagaacatctcgtaaaaatcgccgatgcggtaaaaaagaatttcgtccttgtgttgatttttgatctcaagatactgctgcatcatgggcgaaagctctgccatggtttttcctctttcccttgtatggttccgtcagccggtttgcgggctgtaaccgccggtgcaaacaaaacgcggtctgtgttgcacagccgcgttccgatgaaaactctgcttagtggcagccgccgcaggtggagcagctgccggtgcaggaggcagaaggctcctgcacggtcatggggtcgccgccgttcatggcggtgttgatgatggcgtcgatatagttgaccagattctcgcactcgcgcttggcctcgttatatgccaccataccttcgttgcccatgatctgaccgtaaaggctgttcaccttctcgttcagctcagcgatgcgggcgtcgtcgcgctcgttcttgccgatctcattgttcagatccatgcgggccagattgaactcgccgatcaggttctgcagctcctcatccttgtcgtttgccttgcgggcctgatccagaataacgtagcgggggtcggtctgcagtgccatagcggcacgcttgaaaagatcaatgcaatccatgattgggttctccttgttgtttttattctttctggggcagtttgccccggaatcacgtttttatgcttccacttcgcccagcagcacagtggcgcgggcaccggtaagatgtacggtcgcgtagctgcccagcagtgccgggtcggcggcaaactccacggtcaggttgttgtccagccggccggaaagggtgccctcgttgcggccgtaaccttccaccagcacccggacagtctgccctacctgcgccttgaccagcgccatggcgatctcgtcctgcgtagccagcaggcgggtcatgcggtcggtcttttccttgcggggggtggggtccggcatttcggcagccttggtgccggtacgcttggagtagataaaggtgaacagctgcatataacccaccttgcgcaccagttccagcgtttttacaaagtcctcctcggtctcgccggggaagcccacgatgatatcgctggaaaaagtgatgccgggcacggtcttgcgggcgtattcgatgagctccagatactgctccaccgtatagtggcggttcatctgctgcaaaagccggtcggaaccgcactgcaccggcagatgcaggtgcttgcacagcttcggctgggcggcgatggtatcaatgagcttatggctggcgtccttggggtggctggtcataaagcggatgtgataatcgccgggcacggtgcacagcaggttgagaaggtcggagaaatcgatctgctcttccagacccttgccatagctgttcacgttctgacccagcagggtgatctccttatagcccgcttccacaaggctgcggaactccgcaaggatatcgccgggcttgcggctcttctcgcggccgcggacatagggcacgatgcagtaggtgcagaagttgtcgcagccgtacatgatgggcagccatgcgcggaactcgctctcgcgccggatgggaatgttctccacgatgaccggacgctgggcggggtccaacagcacccgcttatgcttttgcaatttctgggcaaccagctgcggcagggtgtcgatgccatccacgccgaacaccagatctacataggggtagctcttgcgcagcttttccacaacgtgcttctggttagccatgcagccgcacaggccgatgatcaggccgggctttttttctttgagccctttcagcgcgcccacgttgccgaacacccgctgctcggcgtgctcacgcacggcgcaggtattgaacaggatcaggtcggcatcctcgggcttatcgcacaggccgtagccgatatccaccagcacgcctttaatgcgctcgccgtcgttgacgttctgctgacagccgtagctgtgcacaaaggccagcggcggggtgtcgtaggtctgccgcaccagctcggcggcaacggtattatgttcaaagttaatgtattccaaaaaaaccatccttctccgccgggcagggtagccccgtgcggcgaaactctattttctgctattctataaaagacactctttagtataccctgtttggccgctgcgggcaagaggaaacacgcaaattttatgcctgtttggccgctgcaacctctgcatcctgtctgcggcagcactcttcgcacacgcccagcagcaccacggcgcaatcctgcaccctgcccttctggtttttgaccagttccatcacctgttttccgtccacatctgcatcggtcacgccgccgcagacggtgcagtacaaatggctgtgccacggcagagtgtggtcaaagcggtcggccttgccggggatggacacccggcgcacacgcccggcctccaccagactgttcaggttgcggtacacggtgccaaggctcaggttcgggcactcctgtgcggctttatcgtagatctcttccgcagtcgggtggtcgcacagccgctccaccgtctgcatgacaagctcccgctgttttgagtagcgcatatccatcctccttttttacacggttcagacgttttcttcccctttgatctttgcccagtacgcccgggcggcctgctcggtcttgttgtcgccaaaggtgtaatacttggtatccttcagcacatccggcaggtactgctgctgtacccagtggtttgcgtagctgtgggcatatttgtagttctgccccttcaccagcgcatcctcgccatcaaagtgcttgttttgcagctggcgtgggatggggccggtgcgcccggcctgcacatccgcaatagctgcgttgatggcgtcgtgggcgctgttggatttagggctggtggccaccagaatgaccgcgtccgcaagcggcagacgagcctccggcagacccaccatgttggcagcatccaccgccgccttgacgatgggaatgatctgcgggtaggcaagccccacatcctcgcaggcgcacaccatcaggcggcggcaggcagagggcagatctcccgcttccaacaggcgtgccagataatgcagtgccgcgtccggatcggagccgcgcatggacttttggtaggcagaaacgatgtcgtagtggtcgtcgccctcccggtcgtagcgcatggcggtgcggcgagtgacctgccggatcatatccagagtaatgcgcttttctccgttttccaccggtgctgccgtgactgcaaagtccagacagcccagcgccttgcgcagatcgcccccggcgctttcggccagataggcacaggcgtcctcgtccatgcacaccggcacctgctccccctcggaaaggcgctgcacggcgttgcgcaccccgcgctccacatccgctgcggcaaggggcttgaactcaaacacagtgcagcgggaaagcagggcattatagatgtaaaaataggggttctcggtggtggacgcgatcagggtgacgctgccgtcctcgatgcattccaaaaggctctgctgctgctttttgttcaggtactggatctcgtccagatacagcagaatgccgcccgccgctgccagcgtgccgatatccttgagcaccgccttgatatcccctgtgccgcaggaggtgccgttgagcttgtgcagggtcatgccgctgttctcggcaatgatacgtgccactgtggtctttccggtaccggaggggccgtaaaagatcatgttgggaatgcgtccgctctcgatggtgcggcggaacacccgccccggggccagcagatgctgctgcccgcacacatccgccagcgttttgggacgcaggcgctgcgcaagaggttcgttcatggtggtttctccttccctgcccgcaaggcactttttatatagtataacgcatttagaaaaggaggacaagggcttttctgaaaatcattctcagataatgccccgtaaacatttacaaatcctgtcaaacatggtatgattcaagtattccctttcaaaggaggtttgtcccatgccggtacgaaaaaaggccccggaggaccttaccgcaaaaaaagcgctggcgctggaggtcatccggcgtctcaaggctgaatacccagatgcagggtgcacgctggactacgaccacgcatggcagctgctagtcagcgtgcggctggccgcccagtgcacggatgcccgggtgaacattgtggtggaagagctgtttgcaaaataccccagtgtggcggcgctggctgccgccgaaccggaggacattgaagccatcgtcaagccctgtgggctgggacactccaaggcgcgggacatctcggcttgtatgcggatgctgcgggacaagtacgactgccgggtgcctgacacctttgacgaattgcttgccctgcccggcgtggggcgcaagagcgcaaacctgatcatgggcgatgtgttcggcaagcccgccatcgttaccgacacccactgcatccggttgtgtaataaaatcggccttgtggacggcatcaaggagccgcagaaggtggagatggcgctgtggaagatcatcccgccggaggaaggcagcgacctttgccaccgctttgtgatgcacggccgtgcggtgtgcaatgcccgcaagccggaatgcgaaaaatgctgtttgaaagacatctgccgcaccgcccgcgaagccgccgggcagcaggcagagccgtgattttcaaggaggtataatctatgatcaccttaaccattttacttatcgttgccctgctgtgtgtactggtgggctgtctgaccggcctgctgacgctggtaggtgtgctggcttccctttttgtgggcgtgctggtgggcgcactggccggatatctggccgggcgttttatgggcacggaaacttcccttggccgcaacatcctgatgggtgtgctgggcagctttgtgggcgagtttttgttcggcctgctgggcatccacgcttccggcagcttttcttcctttgccatctcggtgatcggtgcctgcatctgcatctggatcggccagaagatctccaagtaagttttttgtaacagtacgccgccgcattctgctgccggagtttccgggcagggtgcggcggcttttagctttatatccgagcaaaaacgtcttgcgcagaaatatcttccgtttgattaaaccacgatgcacacgcaccgtggtttttgtttgtccatttttagcacgatacagaaatgccccgtgctatttttgcatcaccttgcgccactgatcaaaacctatatccattcccctttcttataccccgctattcccgcgagaactgacgctcattggcggtgttgcactataaaaagctttgccgtttacggtgccctgcgtcatgccaattaaatcgatcagctgatcctcagaatatgcaaccggacagtttttcagtttcttggtgctacacgaataggctccatctgttaaggtgactacacccatccgttccagacttgccagcatctttccaagttcttttcggtcacattttattcctttttccgaaatagctgttgcaatctgggatgccgacaatgttttttcagttagcaacatggccaatgcaaactttgctccttttaagtagtaggggatgattttattgcgtatccaaattccctttttcatgttgcgcttctcctttcaggatctgcccatcctcgatccgaatgatctgctgcgccttctgcgcaatttccgggttatgcgtaacaacgataagcgtttgtccaaactccgcagcgcattccatcagcagccgcatcgtatcctcacccgtccgtgtatccagatttccggttggttcatcggcaaaaacgatacgcggttttgcgatgagcgcacgagcgattgccacacgctgctgctgtccaccggaaagctgtgcggggcgggaatgcagcttgcccgcaatgcccaagatcccggtcagcttgtgaagcatttgctcatccggtgctctatggtccagataaaatgggatcagaatattatcccgcaccgtgtactccgggaacaggcggaaatcctgaaaaataaagccgatcttttgccgccgcacctgtgccagctgctccgcattcattgcataaatgtcctgaccgtccagcagcaccttaccggtggtgggtggcaaaagtcctcccagaattttcaggagcgtggattttccgctgccgctggaaccgatgatggacgcaaatgtaccgttttcaagggtcaggtcgctatttctgagggcgtgaaccgcgctttccccttccccgtaggttttggagatctgcactgcttccagaattttatctttcataaaatgtcccccttggatgcttttttacgaataaaggagaagatcggcagcaacgctgcggacagccagaacaccatcagcagaatgctgaccatgatctgacttcccacgggtttatggaattcaaacacccgtccgcttgtatggatacggatcaggtcgagaatgctctggatcggaacgatacgcgagaccgccgcatagacaacgatattcacaagcagcgttgtcccaacgatgaccgggagcagcagctttgcataggacagcaccagttttttcggggaaacgcccagcgtcaggagaagcgacagccgctgctgctggatttcataagccgaaaggttcaaaaccaccagcagcgcacaccccagaaggaccccgaataccgcaaggatgccgacaaggaaagcgctctgtgtgccctcggtgtagctctggctgatcaggtcgtagttatctgcacgcaggataccattcctgcgcgtcgcaatggaggaaatagaccgccgcaaagagaaattgctgtcagcggacagtttcacgttcaggctgctgtatccttccttttccataaagtagcttcctgcgctctcaaacattttatggtaaagagccgtactgacaaaaattgtgccgctgaaaaggagccggtctgttgtcagcagtgtgtaattgcttgcagactttacgacaccggcaatgggcagctgggcggtgtacgtccggtagacctcattcccggcttcatcctgcccggtataacgctggtattggaggttcaacttgtctccggccgcaaaaaccggttcaaccaacgtactgccatccggttggaagccctgataatattcatccgcagcggggtcataatagcaatctccccacagggtcaaaacagaatcccctgccagcagtgtctctatttcctcgtccgaaacgccggcatctacggcaatgcggcgcagttcgtcctccggcaaggcgcagacagtcgtatttagtgttccttttgaggcattttgcattattaaactcgggatgtcgccgttgtccttgacccagatatcggcaagcatctggctggaccggatcttgtctgacgtcacggtataggtatcggtcagatcaattgcagcggaaacctcttccaccccgggcaatgcagcgagatcctctttcagagaaaacggcatcccggaggttccgttcatcttgatggacagacaggcatacggtgcatccagatcatacggcagcatgacacgccagccgacatacagacagctgacggcgatcagcaataccgcgcagccgacaccgatctgcggtgcaagcggcagctgtgccaagcggaatttttttgcaggcttctctttgggttttgcggtctgcgggcgaaccagcaccgcaggcaaaagtgcgcccagcaatacggagagcagaaacagcactgccagcggcgcaagagatgcagcggggatcaccaagaacgaaaggtgcttctgcagccccagaccgatggccgcagcaccgcagcccagtgcaaaccctgcagcaactgctgcaagcccggcaaaaagcgcttcccacaggcacataagccggaggtcccggttcttagcccccagcgtcaggaaggtattgatggtatgtacacgcttgtgcagaacgatcaggaaatactgcgccaccgcaaaaaagctgaccatgatcgctgcgaccagtaaaaagcgcaaagaagatgaaacggcatcctcctgcgggtaggcatactcgtttgccactaaagcagggtcggtcgaagcggtcacgggtgcggctgcattcaggtaataaaacgtctggaacttttgcccgtctatggcaagcggctctgctacaatgccgctgacggtcagactgccgttcagattccaatacacatcataggcaggcaaaacaccgcacagtgtataggctttttccatcactgcgccggagcctgccaacgggtcgtaatcattggcagtcaccttcagcgtgaccgtctgccctacgtcataggagcagcccagcgcatccagcagcgtcgttgtcatggcgatctcatcgggctgcgtggggaaatcaccgctgatcggcacgatacgtcccagctgtgcaaaggtatcgtctaccgttccgatcccgcccgccacgccatcgtctgcgccgagaacgattccgttttggatcactgtgctgacctgtgcggatgcaggcaaggtgttttgtgcctgtgcagcgtccgcagcagtacccgacaaacgcaggtactgccattcgccatataactcacagcgggtatcctgcaatacctgtgcagaactgaccgagtagatcaccgccgccgtcaggaacgagaaaaccagtgtcagcaaaagcagcaataggccggtctgcttcttgcggccaagcatcccatgaaacgccagagtgatagatggactttctttgattttcataaggcaccctcgctgtataagcgaaaacattttgtctccaaaattataatgccgctccatgtttggagctttccagctttaatataccatagatttttttgaaatcaagacctttggcaaaagtggtatatcacaccgcttgatgcaacgctttttactgaccgcctgtttcaaaaaagaagttgtccttacgatggtgctatctttatattacgcttttgatcgtggagcaatgtatacgaacaaccgagaaaacagattttcccgtttctgtctgcacagataggtcaatgatcctacaaacacttgacagcaggacaggaaacgaggtaaactattgcaagtataggctcattctgtctttcagaatgagatgattcaatagggcacaaatgattgcactgggatccattgaaacccagagcttttgcttatattgcgggacagggcgaaattggtgctgtaacagatcactatttttcagcaaataaaacccttattgcaaaaatatattgtagatcaaaagcactcctctttcccagaatgacttcaccaaaatcacaacgaaaggttaaaggaaaaatgaactatcctgccaagtattttgtactggaacagggcgagctgccggaggtatccggcggcggcttgctggatgtttttgaccgcgtgaccgcttatacgtttcagaaccagtttctgggcagtatgcgcactgccgtgtggaactgcctgctgcaaaaaagcctgcagccgacggtagactgggcaaaagacttctggcagatgtccctcctgcgaaaagcgacctttctgtacggcggtgtccggttagggcagaccgtggccaactactggaagatgtaagacggcagggtgatatatggagaacatcaagctgttggtagcgatgcacaaagcgtactgtctgccgaaagatgcagtttatgcgcccattcaggtgggcggtgtacatattccgggcatggaaaacgcgctgagagacgacaccggagagaatatctcaaacaaaaacagatcctattgtgagctgactgctctttactggggctggaaaaacctgcaggcagattatctggggttggtgcattaccggcgttattttgcccgcagaatgcccggcggcagaaagtttgaccgcatcgcatcaggaaccgagatccatgctgcactggaaaaagcccctgtgatcctgccgaaaaagcgcaattattggatcgaaacgacctatacccagtacattcacgcccatcataaggaagatctggatgctgtacagagtatccttgcagaaagatacgcagcctacctgccggcctacgcagctgtcatggggcgcaccagcgggcatcggttcaatatgttcgtcatgcgcagggacattctggatgcatactgcacatggttgttcgatgttctggcagaagccgaaaagcgtatcgatgcggaccgttatgatgcgtacaatggccgtgtttacggttttctggccgagcggctgctggatgtctggatggaaacgaaccatattgcgtatacggaactgcccgtggtgtttttggaaaatcagcactggctcaaaaagggcactgcatttctcagccgtaaaattcgatataggagaccgtaaagaatgctggtttatattgcggccacgctgatctcctgcctgttggcagtctggtgcgaaaaacggaacaccgatgctctgaacgctattgacagcaaacagcgctggggagcacttgtgctctgttccctgccgcttatattagtaagtgcggcgcggtggggcgtgggcacagattttctttatacctatctgccggaattccgggctctgcagtggctgcgggcaggcggtggcgatgcgctgtgtcaggagctgtttgcgccgatgcgcgaagatcttacccggtgggggctgtatgagagtccagagtctgctttgcagttctttttgggtgtgctggacaattgcgagccagggtatcgggtcttgatggaagctgctgtggcattgggcggaaactttcgtcttgtaatcgcggcaacatctgttataataggtttgtgcgtttattatgccatattcacccagtgttctgctccggttctggctatctacctctatgtagccagcagcaattatttcctcagcatgaacatcatccggcagtacattgccattggcatcgggctggtggccgtacagttcatccgggagaagcggctcttcccttttctggcctgcgtggcggtggcaatgctgttccacactacagcggtggtactgctgccgtgttattttttgtgccgggtcgagctgaatccccgctatgccctgttgctgacagcaggcgtgctggcctgttctggtgttttgggtacggctgctgcctggctgatgccgcggatcgggctgggatattatgcccgttatctgggttctgcatggagtgaagacggctttgagacgatgttctttgtcataaacctgtgcgttctgctgttctgcgggcattactggaatgcagcaaagcagcgctgtccctattacgttatttggtacaacatgaccttgttagggacttttgcactggcactgtccggggtgctgccgttgatgaaacggttgaattactactatgcagccccgcagttcctgctgcttccggaagcgctgcagacagaaacagacccgcaccgccgccgcatcctgaccgggttggtggcagctgcctttgcggcagaaactctggtagctgtagtgctgctgaacaaaaacgaagtgttgccatatcgactgtggtgatcactgcataaaggagagaaagtcgtgatcaaatgcacggagaggtcaggtgtctatcaggcagtcaaacgcctttttgatattctggcaagtcttgcggctctggcggtgttgtccccgctctttctggtgatcgccattttgattttatcagaagacggcagaccggttttttacaaacacacccgggtgggcaagggtggaaaaacatttcagatgtacaaattccgcacaatgtatcaggaccggaggatcgttctgaccccggagcagcaggtggagctgcagcaggagttcaaactggaaaacgatccccgtgtgacccggatcggcagcaagctgcggatgtccagtttggatgagctgccgcagctgctgaatatcctgaaaggcgatatgagctttgtggggccgcggcccattatggagcgggaatttgaattttatactccggcggaaaccgcagcatttcagagcgtcaagcccggtctgaccgggtactggcaggcgtatgcccgcaacgatgcaacctatcagagcggggaacgtcaggccatggagatgtactacgtaaagaatgtctccccctggctggatatccgtattctgttcaaaaccgtaggcgcagtgctacggaagtccggtgtaaagtaaggcagtaaggcaacttgtaaaaaggaagcagcgtttatgaagaaagcactgaaaaaaacgttgtgtgggatcggatcgtgtgcggtagtggcaggtggtctgctgtattttagagctcatacagagccatcgcctttgcccgtcagtgaacctccggctgcacagagtgcggtctctgagccggaaagcaattcgtcgacagatacagcaaaagaagacgtggagaccctgatccaagacggcgagaacatgagcagctcggaagtggaagaactgcttgaaaagatcgccgcacaggaagaaaacgctgccggaagcgaagcatctgctgcagccagttcatcccgtccggagggggcttccagtgcagataccagcacggctgcggtctccagttctgttgtatcgcaaagccagagcacatccgctgctgcttctcatccacagcaggacgaatgcgacgcgcagatcgaagcgttggtagcgcagctgtaccagcagcaggagcgctatgaacgggagctgctggagatcatccggcaggcacatcaggagtatgttgcttacccagaagatcagcgcggcctgattttgaaagtacaggtcgttcttggaaaaacaaatgttctgacagcgatggaaaaggactgcgatgccgaagtgaataatatatgcagccagatgacggctattctcaaggcaaatggtcgggatactgccatcgtgcgtgaagtaaaaaagacatacaccgataaaaaagcagaactcaagcaggaacttatccgtcagacttacagcggtggcgatggcagcggttcggccgggcattggctgtatgatcggctggaatgataatttgtatctacagcagtttgcttttttagtgcctaagcaacacccgcaaactgcatatcgcaaacatgatgttttataggcactatttttgaaaatcacgataacaaacaacgatcacgaggtggaattatgaaatacccctgcaattacgatcttctccgcgaagaagaaatggtctatatcgctggtggttcagcgctggatgcattcaactacctgtttggtgactggttccgcgatatgctgctttccgatatccgcaatgcaacgtggggcagtatgcagcaactgaatatacagcctgtggtggacaccggcaaaaagattgctagttgggcttggccggcacagctggcctatgggtacggtttctaccgtctggcgctgaccgtaaagagctttctgacccagtaaaatgaaaaaacgaagccgtcagagtatcatgtgatatctatcacacggtactctggcggcttcttattttatagcaattcaactttttaatgcaacagcagcagcgttgcactgcatatcgcagatatgctgtttgaatgttgcactaatttcttgacttgcgataacgatcattctgctatcacttcggttccagtcacttcacgcctgcctttttcgcggtaaaacgctgatacgcgggctgcggcagcagcacgcggcctgccagcggctgcacctgcaccgacacctgcttgcagggggcgcactcgccgtccacggtggcaatgatgggtccacggtcatctgctgcccgcagactgaccgattttgcacggcggtagataaagtagggctttgcagcctcggtcagctggccgttttgaaagtgctgaccgtttttgtacagcatcagcagctttgcaatgacccggcggctgaccttgcgcacgatgaacacatcaagccagccgtcatccggctgtgcctccggccctgccataaaaccgccgccgtaggcgcggccattgcacaccgcgcacatcaggcagtccacggtcagcacctcgccgtcaatgacgtactccaccctgcggccgatatgcccgcacaactgttgtacgatggacagtgcataagctgcttcgccgccgcacagcgggatgcgccggaacttggggatgccataggccacctgtgcgtccagaccggcggcgcagatggtggcagaaagccccagactggtgcgcatcaggtcgatgggcactgccccgcctgccagctgggcgtccagattcagaaactcctcctttgtaccgtaggtgcgcagaaagtcgttgccgctgccatagggcaggcagcccacggcggtcttatcaaagccgtgggcaccggtgagcgcctcgttgaaggtgccgtcaccgccggcggtaaaaatgcgcagctccaccccggccttctgggcggcagcggcggcagcgcgggacagctcccgggcgtggcctgcgtgggtggtaacacgaatggtgtagtcctccggggcaagcccggcaccggcagcagccgccgcgatctgctgcggcagggtgcgggtacaatcagcctttccggctgtggggttcagaagaaacagcgtgtgcatcgggggtcctccctgttgtaactctatttcctctataatagtcgaaaaccgcgccggttgcaagcaaaaatgctattttgctattttcttatagggttacggtctcatcctcccgcaaaacgatactgccatcggcggcacagtctgccgtccagtgctgtcccacacaggcagtcccagcagcaatgcggtttgccagtgcctgctccactgccctgtccacctgacggcgcagctcccgcgcaccgtaggccgatcgagcccgggcagccagtgccgctcctacctgcggggtgtggcgcagccggtagccgctgcgagcagcgcgctgctccagctggcagagcattttttctgcaatggcgcagaggttttcctcccccagcggacggaacacgatcacttcatccagccgcccgagcagctctgggcggaaccacttttttgcttcctccacagcctgcgcggactgcttttcaaacacggcttctgccccggcggcaaagcccagcggcgcgttctgccctgccagaaaccgtgcgcccaagttggaagtaagcagcacgatggtgttgcggaaatctgccttgcgccccatggcatcggtcagctgcccgtcctccaaaatttgcaacaggatattctggatatccgggtgtgccttttcgatctcgtcaaacagcaccacgctgtacgggcggcggcgcacagcctcggtcagctgcccgccctcatcgtggccgaggtagcccggcggcgcgcccagcagccgggcagcggtgtgctgctcctgatactccgacatatcgaacttgagcagcgctttctcgctgccgaaccagctgactgccagcgcccgtgccagtgcggtctttcccacgccggtagggcctaaaaacagcatggcaccaatgggacgccccggctcgcccagaccggtgcggctgcgccggatggctcccgccacggctgccaccgcccgctgctggccgacgatctccgcgttcaggcggctttccagcttgtccagccgctcccgctcctgctcgcccacccgctgggcaggcacgccgctggcggctgccaccacccgggcgatatcctccggggcaagcaccggctgggtgcgctgctccttttcggcaaggatgcgcgctgctgcacaggcttcgtccacaaggtcgatagccttatccggcaggcagcgcccgggcaggtaccgcaccgaaagctccaccgccgcctgcaaggtctggggcggcaggcgcacattgtggtaccgctcgtagcggggcgcaagaccgttgaggatctccactgcctgtgcgggggtaggttcctccacctgcaccctgccaaagcggcgttccagcgcggcgtccttctggatgtgggtacggaattcctgattggtagttgcgccgatgagctgcaattcgccccgggcaagcaccggtttcaggatgctggcggcgtcgatagcgccctcggcggcaccggcacccacgatggtgtggaactcgtcgataaacaggatggcagtgccatcccgcaccagctcttccagcaggtttttcagccgctcctcaaaatcgccccggtacttggtgcccgccaccagactggccatatccagcgccagcagccgccgcccctgcagcgctctgggcacctgtccggcagcaatgcgcagcgccagaccctcggccagcgccgttttgcccacgcccggctcgccgatcaggcaggggtcgtttttctggcggcggcacaggatctccaccatgcggtcaagctcggcttcccggcagaacaccgggtccagctccccttcggcggcgcggcgggtcaggtcgcggcaatatttatcgctggcacggctgccccgggggatgctggccgacacccgtggctgggcgggcagcacgaactgtccgctcagctggcggcactcccgcaccgcctcagtgagcggaagccccatctccgccagcagcagcccggcggcgcagccgtcatcttccagcatggcgcaaagcaggtgctccggctctgcccggctgacatgggcgttctgcgccccgatgagcgcatagtccatggtgcggcgcagatccggtgccatagcccgcctgtccagccgctgtgccgggccgctgcgccgctgcgccagctggcggcgcacctccggctcggtgatgtttttccgggtgaggaactgcgccgcagcgccctgctgctgtaacattgccagcaaaaggtggccggtatccgcctgttcacaacccagatcacccgccagctgcaccgcctgctgtaacagccgcgccgccgggcgcgaaaagccccggtagccgcccatgcccagatttttccaaatgcccatgtgtctgctccttgctgcatataaaatcgtctgcactggaagtatagccccaaaggcgcagaaaaaatcagtcgtttgtgtcgggcggcagaaaagtgatggctatagcagtttgcgtttttaatgcacaagcaacatccgcaagcagcatatcgcaaatatgctgttttgataggcactattattgaaaattgcgataaaagaacaacgccggaaagaccgcagaccttccggcgttgcattgctatgggagggacagtttacagcagccctctatatttttcagaatgaaccgccaccgccgccatgggtcgagccgctggaggaggtgtgggtggaactgccgccggaatcgccggagctggtctcctttggccgctcggtgcggtgcacgtcccggtacaggaacagatcccgctggttggtcagcttcatgctgccctgccgcacataatcggttgcgtcccgctgcggtgccacgctcttgagctggcccttcatcacgccggtcacgatcagcgccgtcaccagaccaatgaccagcgccacgcccagatacacgatagagaacggctccttgggcatattgtctacgtcatagggttgaccttcgcgggcggcggtgacatacgaatccgtccactggataaaggtgcggaaggcggcggcgtaatcgccgtctgccatatcgggggtcatctgctcgccaaggtactggatgccggcatccgtaaatgcggtgatgccgtagccgcaggtggagatgtgccacttgcggtcacctgtgcttaccagcagcagtacgccgtcacggtctgcaccgtaaccgaactgacagtagtcatagaggtcatcggcatattcctccatgctggtgtaaccctcgctttccagcgagtcgatggtggcaatggtcacatcaaagctctggcggacgctcagctcctccagtgaagcttccagttcgctgttctcgtcctcggtcaggacttctgcgctgtcgttcaggcggtagtataggtcagcaaagccattttcggcagcaaaagccggtacggccagcgccagcaagagcaccagtgctgccagcgcagcacagagggagcgcagcggggtaacagtctttttcatcttccgttccctcctttacagaatccctgccagccacagcagccacatgaccgcataggacgcggcgccaacggctgccgtaagccccagcgtccacttgcgggcagcggccttatccaccggcaaattgcctacaaacttaccggtctggccgttcatggcaaagatgtaattctcgccgcgccagctggtgctcagcacccagactgggaacagggcatactttgccttgccgccgtgcagctggatactgctgttctccaccttgaccgagtcgtaaccggtgacggtctgggtaaaggcatcctcggtggactggcggatacgctcgttggcgcgctcgatgctctttttggcgtccacatcgtacttatctgccacatagcctgccagatacgcagtgttgaaggccactgcatcctgcatggcaaagggctcgatggattccatcaggtcatctgccatcttggaggagccgtccaccggtactgcgtcaaagcccagcacgccgtcccggcgcacggagtagtagctggtctcggtatagtcgtagtcatcgtccgaccagcagcgggtgcgggtggcggtaaagcgcagctgggcatcggcatcgctgtcgtacagccagaagggcacatacacgcccttgatctcgtcgatatggttctggctgcggaacaccttgggcagcagggtcttgcccttgaggtgctcctgtagcttttccttagctgcctttttgtccagcttgaaggggatgatgaggtcggggcgcaggtctccggcaaactgtccggtcagcacgatggggttgccgcagaaggggcaggccgaggctgccatggtatcatcgcccacgatctcgccgccgcagctcttgcagacataagtatgcagaccggcggtctcgccctctgcccagccgccgccgggggtagtccagttcatcctgctgggcttcgcatccttcagatcctcatcgtaacccttcagtgcgtccacctcaaactcggtgtcgcagtaggggcatttcagcttctgggtggtgctgtcaaatttgattgcaccatcgcagcaggggcacttatattccagcattcctgccatagtgtttcctcctatagtctgcggggcaaggagtccttccctgccccgcagcgtgatcggtcattgtacgcagattcagctgcggtcgttttcgtcgaaaggatcgccgcactccgggcagaacttgggcgggtgtgcggggtcagccggttcccagccgcacttgtcgcacttatatttaggcataccggcgggacggggtttgccgcactcggagcagaacttgcccttattcactgcgccgcagctgcacttccagccttctgctgccgccgggcggggcttgccgcactccgggcagaatttgccggtgacggtagcgccgcagctgcaggtccagctgtcggcagcgggcttcggctccggctttttgctgccgcattccgggcagaacttgccggtaacggtagcgccgcagctgcactgccagctgccagcggcagaaggctgctgctggggcgctgcgggctgctgacccatggcaaacagattctgggcgttcatgccgtttgcaccggctgccatgcccatgcccataaaaccggtcatggcaccggcggtgtttccggcggcggtcttcatggcgtcgatctgaccgcccaccagacgagctgcggcggtggtggggtcggtggtcatggcgttttcttcccattcggtgatcttcttctgctgctcctctgggatggacagggagttgatgttgaaggagaatacctcaatgccgcgcttcttgcgccagacattggacagctgctcgttgagcgcctcggagatctccagcgtgtgagcggggatctcgtaatactgcaccttgttggcggaaagggtggccagcgccggctgcaaagcgttcatcagttcgctcttcaggcggggagccagctccgaggcatcgtactggtcggaaacattgctgcacacattggtgtagaacagcagcgggtcgcagatgcggtaggtaaagctgccgttgcagcggatattcaccgagagcttgtagccccgctcctcgctgaccaccacccggaacgggatgggcgtcgcggtgccgtacaggatctcgcccaactccttggtgttgatgtagtacacacgctgatccttgccggtgtcgccgccataggtaaagcgcttggccacggtctggaaggtagccgccagactgtcgccgaagttgccggtgaacacgctgggctcggtggaggaatcgaaggtatactcgcccggctcggcgcacacctccaccaccttgccctgctccacaatgagcatgcactggccgtctgccacggcaatgccgctgccgttggtgatgatgttgtcctcgccgtggttggaactgcggcgggagctgcgcttctgacccttgaccatcagcacatccttgtccagagaatcgcaatagaaaaattccttccactggtctgcaagagttccgcccagtgcgcccatacctgctttgatcaaacccatagtaatttcctcctgtacgttttattgttttgctttcttcttttttatcatgcagaacgatttcgtttgtaaaaaggttctgcctgctcaggggtaagggtcagataattgatattataatcatactgcaatacagcactgaacgcaaggcatttctaaccgttgccacctgccattccggctttctttacaaaaaagaacaccggtgcgttcatagacactccggtgttccgaaataatattttgcctgtcccgcgccgcaaaaggctcagaacttccgccatgtatccggcataaacagcaccagcatggggaagatctccagacggccggccagcatatcgaagatgagcaccagctttgcggggtctgcaaagcagccgaagttctgcattgggcctaccttgacaagacccgggccgatgttattcagggtagcggccacggcggtaaaattcgtcaccatatcaaagccgttcagactgatgaggaagaaggagcccgcaaaaataaagatatacgccgccacaaacacattggtggtgcggatggtttcgtggttcagcagcttgccgtccatgcgggcgggcgctactacctgcgggtgcagggcggtcttaagctccttggccagggtcttggccagaatgaggaggcggctcaccttcatgccgccgccggtactgccggcgcaggcaccaatgaacatgagcatgaccaagatctccttggagagagtcggccacaggtcaaagtcgcagctggaaaagccggtggtggtgatgatggaacccacctgaaacgcggcctgccgcagcgcctcgccgaagctgttgtacatactataaatattggcggtgatgatgcccactgccaccgcgatgaccacaaagtagccccgcacctcctcgctggcagcagcgcggcggaacttgcgcatgagcagcaggaagtaggcgttgaagttgacgccgaacaggatcatgaagatggtcacgacccactggatgtagggcgaaaagctgccaaagctgtcgttgcggaagccaaagccgccggtgcccgccgtaccaaaggcggtgagcagtgcctcgaacaggggcattctgccaatcagcaggaacaccagttccagcatggtgagggcaaaatagatgccgtacagaattttagcggtagactgcaccttgggcaccagcttatccacctgcgggccggggctttccgccttcatcaggttgacgtgggagccgccggtcagcggcagcagtgagagcagaaacaccagaacgcccataccgccgatccagtgggtgaagctgcgccagaacagaatgcccttgggcagatcctccacgccgggcagaatgctggcaccggtggtggtaaagccggagaccgtctcaaacagggcgtccacggggttcgggatgcagccggtgagcacaaagggcaccgcgcccattaccgagatgaatacccagcacagcgaggtagccgcaaagccttcgcgcatatagaacaccttgctgcggggtttgatggtgtgcagggcgtagccgatgccggcgctgaccgcagctgtgagcagaaacacgcccagcaccatccactcgccatacacaaggctggcggcggcgggcagcagcagcaatgcgccttcgatcatcagcacatagcccagcagacggaaaacgatcgcataattcatagtccgcctccgtcagtgctccacgatatcgcgcagatcgtgcaggccatgctccagcgtgaccacgatgacgttgtcgcccacctggatctggtcgccgccgcgggggatcaggatcttgctgccgcgggtaatgcagcacagcagcagattctttttcaggtgcagctggctcaggggcacaccggtggcggcgctttcctcgtgcaccgtaaattccagcgcctccacgcggtcatccagaatgcggtacagcgttttgatgttgctgcctgcctcgttctgcagggcgcggacatactgcacgatgtagtcgcaggtcatgtacttggggtagaccacgctgcccagatccagcccggccaaaatatcgtcaaattccagacggttgactttggtcaccagcttgccgttggagtgcttttttgcaaacagggtcagcagcacgttctcctcgtcaatgttggtcagcgccacaaaagcctcggtggattccagaccctcggaaagcaaaaactcgcggttggagccgtcctcgttcaggatctgtgcgccgggcagctgctcggccagctctacgcagcgggcggcgtcccgctccacgatgcgcacccgcacatggttttccagcagttcctgactgaggtagtaggcaatggcaccgccgcccacgatgagggcgttgcgcaccggctgcactggcagatgcagctgctggaagaaggcgtgcgccttttcctgcgtggcaaggaaagtgacctgatcacccttttgcagcacaaagttaccgttggggatgatgaccccgccgtcacgctccaccgcgcacaccagaatatcgctcttgagccgggtggggatctcgcggatggctacgccgtccagtgcatcgggcagcgcaaacttgatcagccgtacacggccatccgcaaaggtatcgatcttgctggcaccggggaaccgcagcagatgggagatctcctttgccgctgccatttccgggttgatgatggcggaaatgccgatctgctttttgataaagtccagctcatggctgtaggacgggttgcgcacacgggcaatgccgtggcagtgacccgcctttttggcaaacatacagcaaagcaggttcagttcgtccgagccggtgaccgcaatgaacacgtccgcatcctcaatgcccgcctcggacagggtggtgatggacgagccattgcccacgatgcccagcacgtcgtagctttcggtcaggtgctccacgcgcgctttgttggtgtccaccacagtcacgttgtggccttcctcgctgagctggcgcgccagagccgtgccgaccttgccgccgcccaccagaatgatcttcataacaagtcctttctcctttggcagcccctttttccggggctagcaattactgtatagtataacatatcccaccgcaaagttctaccgtttgccccgcaaatacattgaattactaaaaaagcgacagttcttttgtgcaaaacagcctgcacgttctataaaagtccgctttttgtttacacctgctgacgtttctgcgcatttttcttgctggcagtgttcggcacactgattttttcataaaaacacccccagtaccggatatccggcattgggggtacgtatcatcgcttcttcggtgtggttattctttggactgggcggcttcggcggcctgtgcatcatactcggcaagcagagcgttgaggtcgtactgatacttactgtggcagaagtggcacaccacctcacaggtgggatcctcgtcccgcatccgcgcaagctcggcacggccaaggctgagcagcatctctttggtacgctcggcgctgcaatcgcactggtactgcaccgtacgctcgtccagcacattgggggcaaagcctgccagtgccatctgcatcatgtcctcgggggtcttgcccgcatggagcagctcggtgacggagggcatggcgttgatgttcttttccagctggtcgatctcggcatcggtagcgccgggcagcagctgcaccataaagccgccggcgcagaggatggacagatccttgtccaccagaacgcccagcgccatcacggtgggcacctgctcgctgtaggcatagtagctggtcagatcctcggcgatctcgccggataccagcggcacctgcccgactgtgggctccttttgcaggcggttatcgcggatgacggtcagcacgccatccttgcccacggcggtgcccacgtccaagtggccgttggctttggcgggcagctccaccagcgggttgtcaatgcaacccttcacgttgccggtgccgtcggtgcaggcaataagcacgcccgcagggccaccgcccgccacacgcagggtgatacggtcgcggtcgtccttgagcatggagcccatcaaggtagcgcccgtgagcagacggcccagtgccgcgctgcaggtggcgcttgtggtgtgaagcttttcggctttacggacgatatcggtggaatccacaccgcagaacacgacaccgccgttctcggacaggccgcggatcaggtttgccataggttattcctccagttgtgtatactgttttgttgcgcagaagaagtagcgctggctttcctcggtcagcgggccaaaggtttcgccatcgcagacactttccagcacaaaaccgtgcttttccagcgccgcacggatggtatccagatcataggtatactcgcagaattcctcgtggaaatgctcgccggtctcatgataatcaatgtccaccgtgatctccaccctgcggtcggcggcgttatagtggttgcgccacacgcaggaggcatcctcttcctcaaaggtgaacgcgttatcgcccagaaccttctggtgcttatagggggtgttcatatcaaacaggaacacgccgcccttttccataaaaaagcctgcgttggcaatggcggtatccagatccgggatgtggttgaaggtatcaaaggtggataccgccgcccggatggtgccgtagagatccagcttgagcaggtcctgccggagcagcaacaaacggccggaaagtcccagctgctcggccttatcccgcaccacgcagagcatctcctccgactgatcgatgccgatcatatcgtaacccgcctgtgtcagcatcagggtcagttccccggtgccgcagccaaggtcggctacaatgccgtcatggatgccatgggcttccagctttgcatggatttggctgtacagggcgtcgtagtccgcttcgccgttgaattcatcgtagaaataggcaaattcgttgtaagccatggcgttactccgcttcctcgttttccgcagccactgcggcgttgagcactgcctgcagttccgggatgccgtagccgttttcgccgctggtcagcaccaccttctgacagccataggggcggcagatgttttcaaagtcctcctgcgttttggcaagctggctctttttcagcttatccgccttggtcagagccaccacataagggatgcggtggtagtgcaggtagcgcagcatctgcagatcgtctgcgctgggagcatggcggcagtccagcagctgcaccagcagggtgtggtggcggggcgcctcgaagtagctgttgatgaggtcgtcccagcgctcgcggtcagcgttgctcaccttggcatagccgtaacccggcaggtccacaaagtagcagtcgtccacggaatagaagttgatggtagccgttttgcccggcgtactggacacgcgcgccagatttttgcggctgcacagcttgttgatcaggctggatttgcccacgttggagcgccccgaaaagctcagctccgggcggtcgctttcgggcagctggctggaaatgccatagctggcaataaaatcagctttattgaagatcatggcgtgttcctttctattatttcagcagacagcgcccggctggttcttctcaggcgcggcggggatgcggctctcccctgccttggactttttggtgcggggacggcctgcggtgctcttggcagctttcggcttgagcagggcggcagccagcacctgcgagagattctgcataggcaggaaggtcaggttcttcttaacctcctcatccacgtcatacagatcaggctcgttgtccttggggatgagcacggtcttcatgccctcgcggtaagcagccatgctcttctcccgcaggccgccaatgggcagcacgttgccgtgcagggtgatctcgccggtcatggccacatcgccgcgcaccggcacgccggacagacaggacaccagtgccgtggtcagggtgacgcctgcactggggccgtccttgggcacagcaccctccggggcgtggatgtgcaggtcgcactttttcagccgctcggggtcgatgccgtattcctcggcatggacgcgcacccaagtgactgccagctgtgcgctctccttcatcacatcgcccagagagccggtaacggtgatctttccggtgccgttgtccatgacctgcacctcgatgggcagggtctcgccgcctacactcgtccatgccaaaccgttggcgatgcccacagcgttggtacggttgaggaagtccggcttgacgatgcgggggcccagcagttcctccagcatggcggcagtcacggctacgctttccacctcaccggcggcgatcttgcgggcacacttgcgcagcacactggtgatggtgcgctccagattacgcacaccggcttcgcgggtgtagccatcgatgatgccgtagagtgcgctctggttcatggtgaccttgccggtcagaccgcaggccttgagctgcttgggcagcagatgcttgcgggcaatgttgtatttttccacgcgggtatagctgggcagctcaatgacgtccatgcggtcgcgcagcgggccggggatgctgcccaagtcgttggcggtggtaataaagagcacatggctcaggtcaaacgggatatcaatgaaatggtcgttgaaggtgctgttctgctccgggtccagcgcttccagcagagctgccgccgggtcgccccggaagtcccctgccagcttgtcgatctcgtccagcagcatcaaagggttggaggacttggcggtgatcatggcgctgatgatcttgccgggcatggcaccgatgtaggtgcggcggtggccgcggatctcggcttcgtcccgcacgccgccaagactgatgcgcacatacttgcggccaaggctttcggcgatggagcgtgcgatgctggtttttccgacacccggagggccaaccaagcagatgatctgcgccttcacgtccggtgccagcttgcgcacggcaagcgtttccagaatgcgatccttgacctttttcaggccgtagtgatcccggtccaagatctgctgggcgcggtggatatccagatcatccacggtcatggtgttccacggcaggtccagacaggtgtccagataggtgcggatgaccgtggcttcctgattgctgctctgcatccgggaaaggcggtctacctccttgagcagctttttctcgctgtcctcggcaaggtgcagctcccggatcttgcggcggtaatcatcagcttcggcgtgggtatcgtccccctcgcccagctcgtcgttgatgatgtgcagctgctcgtgcaggtaataatcgcgctggttcttgtccatggactcattgaccttttccgcgatctccttttcgatcttcatcacctgacattcgcggcgcagcatctccacaaggcgctgcaggcggccgttgagggtgttttcgttcatcacagcctgcttgtcctcgtagcggaacaagagatttgccggcatatactcggtgaggaacatagggtcatcgctggaaacgatggtgaacaccacgtcctttgcaaggcgcgggttcatgcccagatactcgtcaaagccagtcttgagggcgcggagcagtgcttcggtctccacagcttcttcgggttttgcggcacgcaccggagcggagcgcacagcagacagcagaaaatcgccggtggtatccagctcggtcagcttggcgcggtacttgccctccaccagcaccttgaccagctcgtccgacacgcgcagcacctgcttaacctcggccactacgccgtaggtgtacaggtcctgctgggtgggctcactggtttccatctccttctgggcaaccagaaatacgttggagttattggccatagcccactccacggcagcaatactcttttcccgcccgacttcaaaatgaacaaggttgttgggaaacaccaccagcccacgcagtgcgatggtgggcagatggagttccttgcgctcgaccttgatggtaactttttcagacatatacaaacacctcccgactgccgcttgaatccctatactgcggcagcgctatcctttggggtcttttaaggtgtatctgaaaacaaagaaaatgacgaatatttcgcaaacacaagcgggatttaaggcaaatagccgcaggaatcctttgtgaatttcaaggctctttaacgtaaaatccagctgtgtttgtagaaatagactaaattttcgacatttcagatacaccctagataaaaatacagttgtttccttattatacagatttccggccaaaatgcaactgccctgccggaatggtcggtcattcggggcggttttcgtgggtgttgaagcccattttgcccagtgcgggcagcagcgcccgcagggtgaccgaggtgagcgcgcccatgacaagccccagcaccagcatgaccggtgcatagtacagcgacaaagacgaggagatgatgacccctgcgcccagcagctgccccacgttatgcgccagtgcgccgcagaccgacaggatgaaccatgtaggccgcaccggcagaagatagtacagcacccacatcaccgcaagggacaaaagcccgccgcacagcgagaggaagcccgccgtaaagccggaaaccagaaagacgaacagcgccttgagcacatccagcaccagtgcctgccgagcgcccatgaagaacagggcgtacatgaccacgatgttggcaaggcccagcttcatgcccggcaaaagccccgggatgaccagcgtgccctcgatgaaggaaagcgccatagccagcgcaaacagcaggccggacagggcaatgtgccgtgttttttgatagttgcggtgatttttaggcatagaggatacgctcctttattcttcgggctgctgcgtctgctcgtaggcttcctgatcttccatggcggcttcccatgcggcaaaaagctcctcctgatggaagcgcaggtcgctcagctcatcgcttttctggcgcagcaggtcggggtcgttgtacacctccggggagttgatctcgttgtccagctccacctcgcgtgcgccgcaggcttccatctcgtcctcgcaggccttgatcttggcgcgcagctcggcgcggcggcggcgctgttccttaccgtagccggtcttggcgggctccgcagccttttgcgcagcctgcactggggcggcgcgtcccatcagggcatcgtagctggggtaaagcaccgccttgccgtcctcaagatagaggatgggacaggccagactgttcatcaggtgacggtcgtgagtgaccagcagcagggtgccggtgtaggccatcagcgcttcggtcaggttctcgcgggtatagatgtccaagtggttggtgggctcgtccagaaacagcagattcggccgttccagcacgatctccgcaaagcgcagacgcgccagctcgccgccggacaatgcttcgcagggcttgaacacggtatcgccccggaagcccagctttgcaaggtggctgcgcacttccagctcggtcatgcgggggtacttgttccagatgacatcaatgaccctgccctgtcccagacggttctgctgctgggcaaaaatactgggacgcgccccggtgcccagccgcaccatgccgccggaggggcggcgcttgccgtccagcacctgcatcagggtggatttgcctgcgccgttggggccggcaataatgagccgctgcccgcggcagaccgtataggtaaagggttccagcagggtacgctccccgatcttgatgctgaggtttttcagcagcaccagctcgttccacggctctacgtcatattcaaagcggaatttcagctggttggtctcgtccttgggtgcctcggtgatctccagcttttccagctgcttgcggcggctctgcgccattttggtggtggaagcgcgcacaaggttgcggtccacatagtcctgcagtttttcagccagtgccacatcggcatcgtgctgcttctggcgcagggcatcggcggcttccttctggggcagataggccgagaagttacccttgtaggtggtcatggtctggaaggatacctcccagatctttgtacagacattatcgaggaaatagcggtcgtggctgaccaccagcaccgcgccggagtagcccttgaggtagttttccagccattccatggtggcaaagtccaagtggttggtgggctcgtccagaatgagcacatccggcttttccagcagcagcttcgccagacgcagccgcgtcagctcgccgccggagagcaccgcaatgttcttttgccatgtatcctgcgcaaagcccatgccggacagcacctttttgatgttcacatccatgttgtagccgtcggcagcatctacgatgttttgcaaagcatcgtgctgcgccagcaggtcggcgttatcgggctgggcagccatgcggcgctctaagatctgcatctgcgccatggcgtccagcaccggggcaaaggtggcgcgcatctcgccatagatatccagcgtggcgtccagctttgcgttttgctccagatagcccagcgttaccccgtgggtcacgctgaactcaccctcgtagtcctgatattcgccggtaaggatcttgagcagagtggtcttgcccgcgccgttttgtcccacgatgccgatgcggtcctcccgctcgacactggcggtcacatcgtgcagcaccaccttttcgccaaaggtcttacccagtttttccaaatgtatcagcatagttttgatccgttatccgttctttttcatatttcagcactgatggcggcggttcttcaggccaacattggccagctcctcctgctccatcaccagcggatacagctcttccagactggcgatctcgtaggtagggatcaccttgccggggttctcggcgtggttggggttgtaccagcaggtatccagcccggcgttgctgccgccctgaatatcgccggacaggctgtcgcccaccatcagaacgtgctcccggttctccacacccagcgcgcgcagggctgcatcaaagatgcgggcattgggcttttcgcagcccattttttcagagatgaacacatcttccataaagttcatcacaccgctttccgccagacggcgggtctgcaccttctgggcaccgttgctgacgatggccagcgtcgccacctcggaaagctcgcgcagcacgtccagcacctccgggctcatcaggtccgggtgggtggacagctgctccagatagcagcggttcatctccacgccgtcgccggcggcattgatggcctttaaaaagcggctgaaccgctcgccgaacaacttttcgcggcggatctggcctttttccagctgccgccacagttcctcgttgatggtgcggtaggtctgcacggtctcggcgtccggctcgataccgtagtttaccagcgtttcggccagcgccttgttttcggccgcgtcaaagttgagcagcgtattgtccgcatcgaacaggatgcaatagtattttgccatagtatctcactttcttttcagcatttcccactttggtgtatcaacagggagaagccagccccaccccccggcagagctggcttctcgttattcagaaacgatttcatacgcagacaggtctgtttgtgccggggtattgtccgggcacattgcctttccttcgcagggcgtcagaccgcatttctgcatttcttcctccagtgcgctgttatccacgttttcccagtcggtgtcgtagtagtccacgctgccgtcggtcacgtcattctccccgggcagggcgggcgtgcgcatcgcttgccagtacatagggctccaccttcctctcacgccagcctatgcggcgcgggagcggagtgtgcgctcagttggcggcttccttgctggcgcttgtctccgttttggaggaagcaggcttttcttctttagaagaagccggttgttcttccttggaggaagctgtgtgttcctgcttagaggaagcagttgtttcttccttgaaggaggtgctgctctgcgaagaagagacgggcttttcttccttggaggaagcaggagacgaagccggcttttccgccttggcggagctgccggtgctttcagaggtgccgttcgaggaggaagaagcgggtttttcttctttagaagaagccggtttttcctccttggaggaggcggacgtttcttccttggaggaagcaggcttatcctccttagaggaagcatcagagctgctggagctggtggacgagctggacggtgcaccgctgaccgtaaactccagcttattgctggtcactgtgcagtcgttatagctggcagtggcgtacacccggaaggtgctgcccagcatggagggatccacctcaccctttacggaagtcttgccggcagcctgtgtcacctcgctgccgttgacataccagcggatgctggaagcatccagatacttgcccttgagggcagctttgaaggtgtaggagtcccccagcatagccttgccgctgctgctgatctggatggaagcggctgcaaacacagcggtcacatccacgttctggtcaaaattggtatccgtgcgggtgcgcttggtcacgccatcgctccacttgacgaacacatagccgtcctccggcactgcggtaacagtaacagtctgggcggcgctggtcaccttgacggtaagagacttgccgctctcgttgccgcaggtcagggtaccgccgccggttttatctacacggtaaccggcctgatactccgttttctcctcaacggccgaggaagagacttcctccgagctgctgggtgcttccaccgcagagctggggtttgcggtatactcggcacgggtggggatgttattggtatccgggcggcggtcctcggtctcataggcgtgggtgcgcagatacttcagcagcaccttcagacctgcgggcttgaggtggatatcgccgctctggtagtaatcgacattgccgtagccgttggcgtccttgagcgcctcggcagagttgaggaacttgacgcccagctgctcgcacatggtcagcagcgccatattgaaatcatcaatgcgggtctggtccatattggggtaattagagtggttggacggaaccggcggcaccgtgttgacgatgatgtcggtataaggatagctggcctgaatggcctgcaccagtgcggtgtagttgctgatgaaatcctcggtattcatgccgttatcgttggtgcccagcatgatgaccacacggcggggcttcatttttgccactgcctgcgcgatggtgtagcggttatcgtcccgcttgaaggtgacgatgccttcgttcagggcggcaccggtgccaatgccctccttggcacagaactgctgcagcgagatcaggccattggcatacagacgcaccgtgttggaatcgccgataaaaagggtctgctcctgataggcattgcctgcatcggcagtcccggtgagcagtgcgctggaggtctcgttgatctggtagtggtcggagatatcctcctccccttccggggcgggcgcgggggtaataatggaagaatcccccggctgctccgtcgggttcttgccccgcttgagcatggtaagggtgatgccgatggtcagcagcgccgccagtgcgcacacgatgcacaccagcaccgcctgcttctgcatcggggtcagcgcctgattctccttctggttattgcttctcatattctatccattctccttccgaaggaatgaaacttcctgtcatacccgggctgccagcagccggtcggtaaggtcggcgcagctttcagccagcagcactggatggaaggcttccagctcttcccggctgccgtagccgtacagcacaccggcagcatccagaccacagtcggcagcgccccgcatatcatcgttgcggtcgcccaccatcagcacccgcttgccctgcaaggcgggctggctgagcacataacgcacgacctcggtcttggtatcccggctctcgtccatggaggcaccaccgataaaatcaaaatacggtgccagcccctgctcttccagaatgggcgtgaccaccttggtgggcttggaggtggcagtgcacaggagaaaacccgcgtccttcagggtttgcagcatctgcggaacgcccgggaacacggcacactcgtggctgcccttcaccgcgtagctcgtgcggtaaaggtcggtagctttttcgatcagcgccgggtcggtgaagtgctcaccgaagcttttgcgcagcggcgggcccagataccggcgcaggtttatgccggatacatccacacccatggtacagaaaacctcttgcaatgtatgaatgataccgggagccgaatcgatcagcgtcccgtccacatcaaataggatcgcatcataatgcagcaatgttttattcctcgctttcatggtgatacatccaatagtatagcacagatttgatacatcagcaattccaacaaaagatttttctgtctcttatgcagaattttcctgaaaagggagaccaccgcaccgtattttgcgcagcagtctcccttgcaatagaacgatttagaatgccctccgcgtgcgctctgggcattatttagaggaaaaaacattttattagaacaatgccgggcagcctgcgggctgcccggcattgcattttcacgggtcaaattacagcggagagcgccccgccccaaaaaacattactgcgcaggtgatgggcagctgctgtcccccgggacataaaggttgttggagacgaactccagcttatccttgagcaccagttcaaggtttgcgacggcgtgcaccatattggtggcggagtcgttcacctccagcagcttgcaaagatccagaccatccagatccatggccttctgcatcttccggctttcggcgcacagaatgtggctgagcgccgtttcctgcagggcaatgctttccatcaggtccacaacagcctgatccaggctgaccttgggcatttccgggcactgagaacgggcgcagggtgtatcgatcatcatagggcaaaaccttcctttccggtcgtgtgccctatcctatgctgcggcaggtgcggctgttactgcttttccgcctgtgcgcgcaccttctcgatggtatcacggtagccgccggagccgtactggatacaacggttgatacggctgatggtggcagtgctgatttccactgccttaacgatctgctcataggtggcaccgtccagcagcagctttgccgcctgcaggcgctgtgccatatccgagatctcctttacagtgcacagatcctcaaaaaaggcgtagcactcctcccggctctccagactgaggatagcatcaaacagtgcgtccgttgtctcatttcttctggaatttttctcagccattgtttttctccttattataacagcggcggcagcgggcaaagcagacagtgctgccgcgcggaatattctgcacgctattactttagcacttcaaagtgtgaaagtcaagacctgtgggtgaatgtttttcaatcaatgtgctattcagttttattctcttcacacatgaaagaaaatcatctaaaaattattcccagaaaatggcttgaattggcgcatcctctgaacttgtgacaagaatattgacaattgatgaaaacgggaataaagtaagacacaatcattcagcaaatgcaaggaacaggacatgatcttctgcatcaccctctttcagcgagccacttctcgggtgaaaaagcggcagtcaggagcagaggaccctcgcctgggagcagcctgtgtgaaccgggttttgtgccccttagtagcacggtgccgtccagcccacgttatcgggcagcatggtcagcgtaccatgcgtgggagagtggctgttttacacagcaagcgaagtggtaccgcggagtaatgcccctgccctggcaggcgggtgcaaaagccttcgtcttcggagtgtgaccgggacaccggtcatgtgctgaggacgaaggttttttacgctccggggcaacgctttgccggacggcagcctaacgttccgaacctgttgcggagtgaaaaaaggaaagaggtagaaaactatgaatacgctggtcatcgtattgattgcagcggtgtgcctgtttggcgcttatgtgctttacggccgctggctggctaacaaatggggcatcgaccccgcagccaagaccccggcagtcgtccacgaggatggccgggactatgtgcccaccaacggctggacggtgtttgcccaccagttcagctccattgccggtgcaggccctgttaccggtgccattcaggccgcagccttcggctggctgccggtgctgctgtgggtgttgctgggcggtatcttcttcggcgctgtcaccgactttggtgccctgtatgcttccgttaagaacgacggcaagagcatgggtatgctgatcgaaaagtacatcggcaagaccggccgcaagctgttcctgctgttctgctggctgttctgcggcatcgttattgccgcctttgcggacatggttgccggtaccttcaatgccttcggcgcagacggtgcaatggtcgaggctgccaagaccaacggcgctgccggtatggtttccatcatgttcatggtgttcgccgttgtctttggcctgctgcagaagaagttcaacttctccggctggaaggaaagcgttatcagcatcgtgttcatcgtgctgtcctttgtcatcggcgcaaacctgcccctgatcctgggcaaggccgcttggagctacatcacctttgtgtacatcttctttgctgccgtgctgcccatgtggctactcaaacagccccgtgaccacatgaccacctttatgttcgtggccatgatcgtgggcgctgtggttggcctgctggttgcacaccccaccatgaacctgcctgtattcaccggctttaccaacgaaaagctgggcaccatgttccccatcctgttcgtcaccgtggcctgcggtgcagtttccggcttccacagccttgtttcctccggtacttcttccaagaccgttgagaacgagaaggatatgctgaaggtcggctacggtgccatgatccttgaaagcctgttggctgttctggctctgtgcgtggccggtgctgccgcagctgccgacggcacccctgccgccggtaccccgttccagatcttcagccgcggcgttgccggtttctttgagatgttcggcgtgcccgcctacgctgctaccgtgttcatgaccatgtgcgtttccgcactggctctgaccagtctggatgccgtggcccgcattggccgcatgagcttccaggagctgttcagcgtggacgacatggagcacgctgagggctggcgcaagctgttctgcaatgtgtacttctccaccttcatcacgctggtgttcggcttcatcctgaccaagatcggctacgccaacatctggccgctgttcggttctgccaaccagctgctgagcgcactggtgctggctaccctgtgcgtattcctgaaggtgaccggccgcagcaacaagatgctgttccccccgctgatcatcatgctgtgcgtcacctttaccgcactggtgcagcgcctgatcgctatggtcaaggccatcagcaccgccgcttctgttactatccctgccggtgagaccacttggggcgccgtgttcatcgcaaacggcctgcagctgatccttgccgtgctgctgatcgtgctgggtctgaatattgtgttccactccttctccgcttataagaaggctgagcacaacagcgaagcaaaggtctgatttaatcccaccattcacaatcctgttttcaataaacaaaacgccgctgacgatacacaaagccgtcagcggcgttttgttgtggaagcgtatttcatattgtaagcccggaaaatctgcggatcttccgggcttacgttttcacaggctagagaaaagagaagccgcttattatatgtgacagctttcccagccttgcagagcggcaagctgggtctcggtatggaaccaatgctccccgccctccagaatggtcaggtgcgccccggtctgctgtcggaactgctccatggcggtgtgcccggtaagggggtctgtatcggcatagagcacctgtgtgggcactttccagtgcaaggggtgttcccttacccagcacagatacggccacgagagggtctcgcccatggcggtggggatctcccctgccgtgcgcagctgctcctccgttacccctgcctgctgcatcagggcaaggatcagcttttccatatccaccaccggggagacaagcagcgccttctccggtttttgcgtctgcaacgcctgcatagcaaaccacgccccgatgctgaccccatacactcggatatgcttccacaccggctgcatccgggcatagaccgtttgcagttcccgggtgaccacccacggcaccagcttttccaggctgttttttcgggtgccgtgctccggcagatcgacagccagcacctgccagcctgccgggcaggctgtgcgggcaaagcgggctgcctcggctgcgctgccgtttttgccatggacatagagatagaccttacggctgcgcttgccgtacaggacagccggaatgcctgcgacctcaagcttgattttttccataacggctccctcctgttttgggggcgtattgcgccctgtttttctctatgatagcacaagcagcagccaaacacaaacaggaaaaaactaatgctaacacgattttgaatggcctccgctgccgctctggccattgttcaaggaaagtatattttaatatttgagattctgaaacgcctgcgggcgtttcagaacctctttttcacagaaggggtcgtaactggaaacggcagctgttgcctcttatgtcctctcccgtgaaaatgggataacggagcgtccgcagacgctccgttatcccaaaataataaatcataattccgctgaatatcgccaaagcactgcggcggccatttgaaatcgtcctgcacaaaaagagccaccgcacaaggctgtgcgatggctcttgagatagtgcttcaggttttgcttagccgaagatgttgatcaggataccagcagcaacggcagaaccgataacgccggccacgttggggcccatggcgtgcatcagcaggaagttggaggggttctcactctggccgaccttctgggagacacgagcggccataggcacggcggaaacgccggcggaaccgatcagggggttcacctgaccgccggtcagcttgtacatgaccttgccgcacagcacaccggctgcggtgccgaaggagaaggcgatcagacccagcacgatgatgaacagggtgcgggtgttcaggaaggtgtttgcgctggtggtgcagccaacagacagagccaggaagatggtgatgatgttcatcagctcattaccggcggtcttctggatacgatccacaacgccgcactccttcatcaggttgcccagcatcagcataccgaccagaacggcggcatccggcacgatgagggaaacaatgatagcgaccatgatggggaagatgaccctctcggtcttggagacggtgcgcagctgcttcatgaccacagagcgttccttggaggtggtcagtgccttcatgatgggcggctggatgacgggcaccagtgccatgtagctgtacgctgccacggcaatgctgcccagcagctcaggcgccagacgggaggtaacgaagatagcggtggggccgtcggcaccgccgatgatggagatggcagcggactgcttctgggtgaagtccaccagaccggtagcggccagcagacgggcgcccatgtaagtaccaaagataccgaactgtgcggcagcgcccagcagcaggctcttggggttggagatcagaggtgcaaagtcggtcatggtgccgatgccgaggaagatcagcggcgggtagatacccagcttaacgcccatatagagcatatcggccagaccgccgttgttcaggatctcgatccactcggggtgctccagaccgtcaccgacgaagtactgcatgtggataatgccgctgccgggaaggttggcaaggatcatgccaaatgccatgggcagcaggatcaggggttcgaactccttgacgatggcgaggtacagcaaaaagcagcccacgcagatcatcacggcgtacagccagccgccgggctggccaaactgtgcaaagccggaactttggaaaataccgaccagagtatcaataaactgtgtcatgctcttcctcctgtgttaaaacggggccgtggtgtcgttcacgccggccttgccccagccatttttgccacgacgcactgccttaagggtgtacttgccgttgcccattgcatggatagcagccataatggcggccaccacgtcaccggggatgccctcctctacctgaggagcgggcgcagcctgctgtaccggagcggcagcgggctttgcggcgggtgcctgcgcagcagtcttagcggccttcttcttggcattcatcgagtcgaagatcttgccctccagcgtgatgatagccatcagcagcacgaggatcaggaacaccagcacgataccagtaatggtaacgaccacatcgaaacctaagtccatggtttttcctcctgtttgttggatactgcaagcgatacaacatcgttagcagaaaatcaatttgggtatagtataccgtattttgccattcatttcaacaaaaattaacaaattttatttttgctgctttgtgatatgacatggacaaaacgaaccaagcttagcggcggccgatgcgcggagtagcatccgtaaagccggtttccagcttatcaccgatggaaaggctctgtgccgtgcccagtgcaacgcagtttacggggtccggcgagactgtgacctccaccttcagttcttggctcagatattcggtcaggccgtgcagctgggcgccgccgccggtcagcatgacgccgttgcggtagatgtcgcctgccagttcaggcggggtcttttccagcacctgatgggctgcggtgccgatctgctcgctgagcatcatcaccggctcgtacaggtcgtcggtggaaacggtcacgcgcaccggcagaccggtgagcaggctgcggcccttgatctccatgctctcgtggaaatcggtcttttgggggcagcaggcaacgtgctttttcagttcctcggcggtgcgctggccgatggcgatgctgtatttgttgcggacgtgcttgaggatctcctcatcgtagtggttaccggccacgcgcacactggtggccttgaccttgccgccaaggctcagcacggcgatatccgtggtgccgccgccgatatcaatgatcatacggccgtccggcagagtgatgtcaatgccggagccgagagcagcggcaatgggctcatcgatcaggtacacctgacgggcaccggctgccaccacagcctccaccacggcgtcgctctcgatgccggtaatggcggcaggtacacacactgccacccggggcttgaccatgtgggagctgtacacctgcttgacaaagcggcagatcagttcccgggtcatggtgtggtcactgatgacgccatccttcagcgggaagatggcggagatatagttgggcgtgcgtcccaccatggccagtgccttgtcgccggcctccaacacggtgttcttgcgggtatccatcgccacaacgctgggctgattgagcaccacgcccttgccctcctgcgcgatgatgatggtagtagtaccaaggtcgatgccgatatcattctgtgccataattgcctgaatcctttctctgcgttcctctatcatgtatgtaacgcccgcagcggcgggcaaaaaacaaagactgttttagtataacatagttgcggcaaaaagtatacaagctttgccgctgttctgcgcggttttatcaggggctttccccttctgtgctgagctgctgtggcggctgtccggcctgcaacagagcgcacaggccgctgtaacgcagattctgccggatgttgctcatcatgctgttcaccacatccctgcggcccgccacaacgcacagcctgcgcgcgcgggtgacaccggtgtagaacaggttgcggtagcacagccttggcggcacctgtgccaccggcaggatcaccgccgggaactcgctgccctgacttttgtgcaccgtgatggcataggcgatctccagctcgttcaggttttctgccgggtagagcagccgccggtcgtccatacgcaccaccatggagcgctcccgcaggttgatgctttccacgatgccgatatcgccgttgtaggcacctacgccctgctcaccgccgatgcggttccagacgatctcgtagttgttacgcacctgcatcaccttgtcccccacccggaacacccgggcggcgctttgcagctggggcttgcctttctggggcgggttgagcaggttttgcagctccacgttcagcgcctgcgtgccggtggggccaagctttgtggggcacagcacctgaatatcccggatggggtcaaagccgtagctccggggcagccgggtggtgacaaggtcgcacaccagacgctgggcggcctcgccgtcggactccaaaaagaagaagtcatcggtcttgctgcccttttgcagcggctcgccggagatgatgtggtgggcgttttccacgatgaggctgcgctttgcctgccggaagatctcgttcaggcagacggtgggcacgcagccggagcggatgacctcgctgaggatgttgcccgcacctacactgggcagctggtcggcatcgcctaccataataatacggcaggtgtagcgcagcgctgcaatgagcgcctgaaacagcttgacgtccaccatgctcatctcatccagaatgaccacatcgcacttgagcaggtttttgtcgttatggataaaactgaccacgccgccggtgtagtccacctccagcaggcggtggatggtgctggccttgcggccggtcagctcgctgagccgcttggcagcgcggccggtgggcgcgcacagggctacccgctcggcctgattttccagcagctgcaaaatggcgttgaccgtggtggtcttgccagtgccggggccgccggtgagcacaaggcagttctcagtcatagccttgcggatggcttccctttgcaggggggcgtaggcaaagccctgtgtcagctccaagatctggatgtttttatccagatcccgggccgtgttcttgccgcgctttgccagcaggttcagccggtcggcaatgtcctgctctgcagccagcagatctggcaggtagatatagggcacggcatcgaacatttttacacacagttcttccgtttcgatgcaatgatccagcgcccgcgccagcttttccggcggctggtggataaagttggaggcagttgtcagcagctgtgcccggggcagacaggtgtggccgttgcccgcattgtggcgcaaagtgcgcagcagggcagcttccagccgctgggcgcagtccccttccatgtggtaatactgggcgatgctgtccgcgtggcggaagtccagctgcagcggctccccgcacagcagataggggtttgacgcaatggcctgcatcgcccccacgccaaaggctttgaacacctccatagccttgcggggactgatctcaaactgtgccagataggcgatgagttcccgcataccgaacatccgcttgaactcctgctggatgcggtcggctttatccggcgagatgccggggatcttggtcagccgggcggggtcgttggcgatgacctccagcgcctcggcaccgaacatatcaatgatcttatccgcagtccttgcgccgatatacggcagggagcggctggccagaaaggcatacaccgcttccagatccttgggcatatcggtctcgcattcctgcgcgtggaactggcggccataggtggcgtggttttcgtacctgccgcggcagatgacgctttcgcctgcgtgcagctcgcctacgatgccgcagaccaccgtgagcaccccgccgccggagatctcgaacaccacatagccgttatcctcgttctcgtagatgatatcctccacgacgccttcgatctgttccagctgctgctcgtccaccagctccacctccttttgcacagatattataagtatagcccttttggcgggatttgtaaattgttgaatccgcaaaatccccgggcggctctcgcctttttccggcggttgtgctatactgggcgcaaacactacgtcacgaaatgaggagcaacaatggagatcatcattcatcaggccattctgcacgttctggataccaccatggatgcgccggtgctcagcggcgggcccatggaactgaccgccgaaaaaaacgcctacctgcaaaaccacattgaaaagctgctggccagcgacgatatccgccagtgccgcccgctgccggactcagcctttaaaaatgagctggaacacaatcgggactttgtggatctttcctgccgcattgccggggtgctgttcgactatatgcacgcccacaccaccatccccggggcagaccttgccgtggtggattttacccgggacggtgcgccgtggctgggcatcctgaagttgaactataaaaacggctacacccactatacggagactgtggagggcgcaccggtgaactccatcatccagcagcgcgcctgcctgcctacccagagcggcaaggtggaggagggcgcactggtagacctgaccgattactccatgcggctgctggaaaagaagtacgatattgacggccacaaggagttttacctttccaccgtggtgttccagtacaccaccgcccagccggaaaagaaaaagctgcaggccattcaggaagccgccgtgcaggctgtgcaggagaactacgccgaaacgccccatgtggaggcacaggtggccatgatgattgccaatcaggctgccgacaacgacaatcaggtgtccatccagcaggtgcgccagcaattggaggaggaatatcccctcgccgccgtgccctttgacgattatgtagaaaagagcgatgtcattgacagcgccgcccagccggtgactgtgacccccgcccgcatccgccggatggaaagccgcagcctgcgcaccgccaacggcattgaagtaaagatccccaccgagctgttgaacgccgaatccgaggtagagttcctgcacgccgatgacggcagcatttccctgctgatcaaaaatgtcattttgtaagctttaactgcaaaatcttgcaaagccctgcgttcagctttgctatccgcagggttttgtgctatacccgtgttgtatctttcgtggtatacgcgttatggcctagaggaggagaattttatggaactggctctcatcaccgcgcagcaggtcgcggtcttgttcctgctgatcggcacaggcatggtggcggtcaaaaccggcgtgctcaagctggaaaacaagcaggcgctttccaatctgctggtgtacatcattgtgccagccatggtggtaaactcttaccgcatggagttcagcgcccagatcttgcgcaatctgctggcggctttcggcatgagcgtcctgtccgtgctgctgggcactgtgatcactctgctgctcacggcacgcaagactggcagcaggatgcccattttccggttcgcctgcattttttccaacgcagcatacatgggcttcccgcttatttcggcgctgttcggggtgttgggcttccacggcactgctgcacaggtggtcgcactgctggaatgctgcccggccgccgccattacctcggtatttgcggtgcagttcggccacgatgagcactttgccgccggaagcgtggtgctgactaccctgctcagcattatcaccctgccgctgtgtgcgctgatcatcaccatggtgatgtaagacgccctgcggcggtgctgctatatttaatattgtaagaagagccgccgtgcatcgtgttgtacggcggctctttgctttggcaagtggagagcattttcggccattgccacacaaaacaaaaaagccatcgtttttgcatctctgcatcaacgatggcttcgtattggagcggccgacgaggctcgaactcgctacctccaccttggcaaggtggcgctctaccagatgagctacggccgcatatccggtgcatttatccctgcaccctcccgagcgattcttgcgaatttcggggcccccgcgaaagcttgcggagcaagattttgtggggaaaaggagaaaatctggtattcatcacagaagtcttgcttgcaagacttcccgatgaatgacaggattttcgacgtggtgcctccgatcggaatcgaaccaatgacacggggattttcagtcccctgctctaccgactgagctacagaggcaaatacgacccggatcgggctcgaaccgacgacccccagcgtgacaggctggtgctctaaccaactgagctaccgggccatatggtggaagttaacgggctcgaaccgctgaccctctgcttgtaaggcagatgctctcccagctgagctaaacttccacatatggagcggccgacgaggctcgaactcgctacctccaccttggcaaggtggcgctctaccagatgagctacggccgcacattccatttgcttgtaccgggctttcgtccggcgacgttggttattataccgcacactccggcagttgtcaaccacaaatttacattttttcaaaaaagaatgtctttttgctctgatacgttcttttttattttgcgtgcggcgaggactccgcccttttcgccctgtttcgcaccgctgtgtgcacgagtaaaatacagttgctttctatttcacaaactattataataaagaggacgctttgtcaaacggaagctgcacccgcgcaggtgtagcttccatttatagaaaagaaaaaggaattgccagcaaaaaggagctaacgcaatgtataagatcactgaaaaggtcgcgctgaaccccaccgtgacaaagatggtcatcgaagccccgctgatcgccaaaaaggcaaagccgggtcagttcatcattgtacgtccgtttgaggacagcgagcgcatccccctgactgtggccggttacgaccgcgaaaagggcactgtggatatcattttccagatcgtgggcggtaccaccatggagctgaacagcctgaacgcaggcgactgtgtccacgattttgtcggcccgctgggccgcgccaccgagaccgagggtctgaagaaggtgtgcgttgtgggcggcggcgtgggctgcgccattgcactgcccattgccaaggagctgcacgatcagggctgtgtggtgcacagcgtggtcggcttccgcaataaggatctgctgatccttgaggacgagttcagcgcctgcagcgacgagctgcgcattatgaccgacgacggcagctacggcaccaagggtgtggtcaccgctgcgctggacgagctggtagctgccggcaaccagtacgatctggtcatcaccatcggcccgctgatcatgatgaagtttgtggtcaagacctgccagaagcacggcctgaagagcattgtttccatgaaccccatcatgatcgacggcaccggtatgtgcggcggctgccgcctgaccgtgggcggtcagaccaagtttgcctgcgtggatggccccgactttgacggcgatctggtggattttgacgaggcaatggcacgcggcaccatgtaccgcccgtttgaggcacacgcccgtgaggcagcctgcaacctgttcaagactcaggagggaatgtaaaatggctttcaatatggatcccaaaaagtgccccatgcccacgcaggaccccaacgtccgcaacaagaactttaaggaagtggctctgggctacaccgccgagatggctgtgaacgaagccaagcgctgcatcggctgcaagaacaagccctgccagtccggctgccccgtgggtatcgacatcccggagtttatcgctcacgttgcagagggcgactttgaagccgcctatcaggtgatcaaccgctcctcttccctgcctgccgtctgcggccgtgtctgcccgcaggagagccagtgcgagggcaagtgcacccgcggcatcaagaacgagccggtggctattggccgtctggagcgctttgtagccgactggcaccgcgagaacgtgcacaccgcacccatcgtgcctgaatggaacggccataaggttgccatcatcggcgctggccctgccggcctgaccgccgccggcgatctggctaagctgggctataaggtgactgtttacgaagctctgcacgttgcaggcggtgtgctgatgtatggcatccccgagttccgtctgcccaaggccatcgtccagcaggagatcgatggcctgaagaagatgggcgtggattttgagtgcaacatggtcatcggcaaggtgctgaccattgacgagctgatgggcgaatacggctacgaggccgtgttcgtaggctccggcgccggtctgccccgctttatgaacatccccggcgagagcctgaagggcgtgtattccgccaacgaattcctgacccgctccaacctgatgaaggcttacctgcccaccagcaagacccccatccgcaccggcaagaaggttgccgttgtgggcggcggcaacgtggctatggacgctgcccgcagcgccctgcgtctgggtgccgagagcgtgtatatcgtataccgccgcggcatggctgagctgcccgcccgtaaggaagaggtggagcacgctgaggaagagggcatcatcttcaagaccctgtgcaaccccgttgccatccacccggacgaggacggctttgtacactccatgacctgcatcgagatggagctgggtgagccggacgcttccggccgccgccgtcccattgaaaagcagggcagcgagtttgagctagaggtggatactgtgatcatgagcctgggcaccagccccaacccgctgatccgctccaccactccgggcttggagaccaacaagcacggctgcatcgtgaccgagggcgacgagggcaagaccagccgtgacggcgtgtacgccggcggcgacgccgtgaccggcgctgctaccgtcatcaaggccatgggtgccggtaaggcagctgcaaaggccatggatgagtacatccgcaacaagtaacaaatagcaacgagggcgctgcacatttaccgtgcagcgccctttttcagcgcagatcttgttatgaacagagtaggcccggaaagtctgcggactttccgggcctacattttcacgggatggacactgccgaaaacggcatctgttttaatgtacgccagccagttcctttacggggcggcctgtacgggtcatttcgatcttgcgggatttatcgtagcagtagcggatgatggcctgccgccgcacgataccgataaagctgccccggtcatccaccaccggaacaaagttctggttcatggcggcttccaccagctcatccatgctggtggtcaccgtgacggccttgtagtcccgcttatgcgcaaactctgagatggggatgtcctcggcggcttccagatccagaccatggtattttttcagtccccacaggatatcgccttcggtcaacgtgcccacatattcgcccttgcggttcagcaccggaatggaggcgtagcggttgttttcccacttttccaacgtctgccggagggtaaagtcatcgtaaacgtacatcagatcctgctttggagaaagaaaaaagagaatgttcatgccaacaactcctatcgcattttttgcaggcaatacctgttggaacggtctgcctgcgctatgtaatgtgccgtgcgtccggcgtattccgggaagtatcatgggaaaagggggctggcagccccttctcttctttgtttctattttagcactttttcatagacaaagaaagccaggcaaggaagcttttataatttattcacagattgtttttctttatttgtcatactttccgttttgatgggttctgcacagcctgccttcagcataccacgtccgctgcgcaaagcagcgcgagggctgtcgagggcagttctcccttttttctttacaaaaaccatgcaaaaagagggcaaaaagcggtaaatccaacaatttgaactgtacaaccacggtgcaaagttgtataatagggtgggtgtttatctgaggcaagctttgttttgcgcagccaacgcccccgacccttgcgtgtatttttatgaaaaataacataaaggagcagagcgactatgatcacttcccgtttcccgcttgggaatgtcagctttactgatgggtatttttccaccctggtgggtgaagccaccaaacagtgctacggcgttgctgccatggctccccgtgatatgactgacgctgtgaaaagcatggtatacggttccgattacccggaaaagggtgtgcgcgtgacccagcagaatgggcgtctggtcatcgagctgcacattgccgtcagctacggtctgaacatttccaccgccgcccgcagcatctcccaccgcgttaaggacgaggtggagcaggccaccgggctgaaggtcgcccgcgtggtggtgtccgtggatgacgtcatcgcctgatttgtctgcaaacccgagccgggattttccggccagttactaaggagtaagaacaatgatttctggtaagatcctgcgcgacgccatcatttccggcgccaacaacatcaacaaccagcgttcccgcgtggacgagctgaacgttttccccgtgccggatggcgacaccggcaccaacatgggcatgaccgtgggcgctgccgtgcgtgagctggaagctctggacgacagctgcaccgtgggcgaagctgccaagactgctgcttctgccatgctgcgcggtgcgcgcggcaactccggcgttatcaccagcctgctgttccgcggcttctccaaggctttggagggcaaaaaagaggctgacgctgccgatatcgtggctgccctgcagaagggcgttgagggtgcctacaaggccgtgatgaagcccaccgagggcactatcctgaccgtggcacgcgttgcttccgaggaagccgctgccagtgatgccgccgatgtgcccgccctgtgggatgtagtgctgactgccggccagaaggcactggaggatacccccaacctgctgcccgtgctgaagaaggccggcgttgtggacgcaggcggtcagggcattatggtcatctttgagggcatgggcaaggtgttccatggcgaggccattattgccggcggcgaagctgctcccaacaaggcaaagctgtccaccgagaatgccggtaagggcgtgttcaccgacgacctgatgaaggtggaggacattaccaacggctactgcacccagttcctcatcaacaagaacgagggtgccagcgccgccaagatgcgtgcctttgcagagtccaacggcgacagcgtggtgtgcattgaggatgacgacgtcatcaacctgcacgttcacactgccgaccccggcaagatcctgagcgaggccatcaagtacggctacctgaccaacttcaagattgagaatatgcacgagcagttcctcgcccgccagaagcagggcaagagccttgaaaagcaggcttctgccgagaaggctccctctcaggccagcgagttcatctacgccgccgtggatcccagccgggactacggctttgtggctgttgccgccggtgagggtctgaaggctgtgttcaccgatctggcagcagacgctgtggtgtccggcggtcagaccatgaacccctccaccgaggatattctggcagccatccagagcgtgcccgccaagaccgtgttcgtgctgcccaacaacaagaacatcatcatggcagccgagcaggcgcagaagctggctgaccgtcaggtggtggtgctgcccacccgcaccgtgcccatgggcattaccgcactgctgaacttcgacccctctgtgaacgccgagaccaacaccatcaacatgatggctgctgccgacaaggtgtccaccggtctgatcacctacgccgcccgcgacagcgagtacgatggcaagcgcatccgcaagggcgagatcatggcgctggagaacggcaagatcgtttccacctccaccgatatcaccaaggccacctaccgtctggcacgcaatatgtgcaagaaggattccagctttgtcaccattatttccggctgtgacgtgagcgacgaggacgccgagaaggttaccgagatcgtaaaggcaaagtgccccaaccatgtggaagtaagccacatccgcggcggccagcccgtttactactatatgatcagcgtggagtaagcactcccctgccctgatttgacattatcacaaaacacaaagagactgttgcatggtattccgtgcggcagtctctttttctggtgaaaaagcaagtcgggaagttccgcagaacttcccgacttggaaattataaaaaattcttccgctgaaaatgcccaaagcgcacgcggcgggcattcaaaatcgtccagacctgataaaaggccgctgcacaaaatctgtgcaacggcctttgtttctcagaaaaagcttacctgactgctctcgggcaggtcgcccagtgcgcccacctgacgcagacggtccagaatgccgctgcccacgccggaggcctgctgcagctcttccaccgagatatattcctctccgtggatggtcacacgctccagagcctcggcggcagcaccgccgaggcccttcagggcgctgaagggcagacgcaccttgtcgtcctccaccacatacttggaaccgcgactcttgcccagctcgatgggcaaaaactcgtacccacggctcagcatctcgttgaccagctgcaagctgaccagcacatcctcgtccttggcgttcttttcctctttcaggcggcgcttgaccgcttccatgtgggcgcgcgccacggcagcgccgccgatggcggcttcgtagtcgatatcgtcgccgcgcacggtaaaatacaccgcatagaacgcctgcggcttgtagatcttgtaccacatcagacggatggcactcatcaggtaggccacagcgtgagccttggggaacatatacttgatcttgcggcagctctcgatgtaccagtccggtacctcgtgctcccgcatggcttcctcccagcccggctggaagccgcccttggccaccttgcccttacgcacggcctccatgatatcaaaggccatcttgggctccagccccttgcgcagcaggtacagcatgatgctgtcacggcagccgatgacctctgcaatggtgcaggttccgctgcggatcagttcgtccgcgttgcccgtccacacgtccgtgccatgggacagaccggagatctggatcagctccgagaaatttttaggccgtgcttctaccagcattccgcgcacgaaattcgtgcccatttccgggatgccgaaggtgccggtttggctgtcgatctgctccggggtcacgccaagcgcttccgggctggtcagcaggctgtacaccttggggtcgttcatggggatgctgtccaccgggatgccggtgtattcctcaaaatacttgtagaaggtgggcatatcgtggcccagctcgtccagcttgagcagggtgtcatgcaggtacttgaactcgaaatgggtggtcagcagaccgcccgccacatcatctgccgggtgctggatgggacagaaatcgtagatctcgtaagtgtccggcacaacgaccatgccgccagggtgctgaccggtggtgcgcttgacgccggtgcagcccagcgtcaggcggttttcctcggcgtggttcacggtgcgctgccgctcgtccagatactttttaacgtaaccataagcggttttatcctgaataccggacaccgtgccggccttgaacacgttggccttgccgaacagttcctcggtgtagcggtgcacattggattggtactcgccggagaagttcaggtcgatatccggttccttatcgccgtagaagccgaggaaggtctcgaagggaatatcgtggccgtccaccagcatccgggtgccgcagtggggacagtttttatccggcaggtcaaagccatcgtccacgctgccatcggtgatgaactcgctgtgcttgcacttggggcagcggtagtggggcggcagactgttcacctccgagatgccggaaaagtgcgccacggcagaggagccgacagaaccacggctgcccacctgatagccgcccgcattggagtaggccaccagcttgaccgcaatgacgtacagaaccgcgtagccgtggccgcagatggaatccagctccttttgcagccgcttttccacgatctcgggcaaggggtcgccgtaatcccgcttggcgtgctcccatgtggcatcgcgcagctgctgctctgcaccctcgatgctgggcgggtaggtgccccgggggatggcgcgcacgttgttgtcgatcatggcggcgatcttgcgggggttcttcaccacaacctcgtaggctttttccttgggcagatagtagaactgcgccagcatatcctgcgtggtgcggaagaacagcggcggctggttgtcggcatccttaaagccgttgcccgcctgcagtacagcgcggtagatcgcatcctccggctcggtaaagtgcacgtcgccggtagcaatgaccggcttgtgcagatcctcgcccagcttgatgacggtgcggttgaattccttgatccgctcctcgctgtccaccttgccatcccgcaccatataggcgttgttgcccagcggctggatctcaaggatatcgtagtaagcggcgatctttttcagttcctcgtagctggtgccgtccacgatggcgcggtacagctcgcccgcttcacaggcgctggtgagcagcaggccgtcccggtacttgttcagcaggctgcggggcacacggggctttttgaagaagtagttgacgtgtgcttcactgacgattttgtacaagtttttcaggcccatctggtttttgaccagaatgatgaggtgatagtatttctttttcagcacctcgcggttgccgccaaggccggtgttgatctcgctgaccttcgttacctctttttccgcaaggtcgttcagcatcacgcagaagatacgtcccagcgcagcggagtcctcgcaggcgcggtgcgcttcgtaggcaggcagttccagatgcttattgatggtgccctgtttatagttgtgcagacccgggtacatggtctgtgccatggtcagagtgtcgatataggtaggttccaacttgacgccgctgcgcttggcagctgcccgtaaaaagcgcatatcaaaggcatggacgttgtgccccaccagaatgcggtcgcccgcaaaggcaagaaaggcttccagcgcttccttttcaccgggcgcatccgccaccatctcgttggtgatgccggtcaactcggtgatcttgggggtgatgggcttgccgggcttgacgaaggtgtcgaactcctccaccacctcgccgttgcggatgatgaccgcgccgatctcggtaaggtactccaccccaggatcaagaccggtggtctcggtgtcgaacacgcagaactcgccgtccagcggctgatcctttacgccgtagacgcagggcaccatgtcgtccacaaaataggcttcgcacccgtagatgagcttgaaatccgggtcttttttgtggatgtcatcggctgccagcatggcttccgggtagccctgacacacgccgtggtcggtgatggcaatggcggggtgtcccatgcggtgcgccagcttgacgatgccgccggggtcgcagaagccgtccatgctggaaagcttggtgtgcagatgcagctccacccgcttttcaggggcagtatcctcccgctttttgcgctccacgatcagcacatcgtaggggtatacgatgtagtcgtgctcgtatttatcgtaggagcagtcgccccgcacgatgaccgtgctgcccttgccgatgccctcccacttggagcagtcctccccttcctgtgcgcggaccttcaggttgatagagccggtatagtcggtgatggacacggtgtagatcttgcggtagttgcccttgacctcggtaaagaacacatcgccccaaatcatgcacttgccgccctcgccgcccagatccttgagaggcgtaaggtttttgggggtaaacattttgccgtggaagatggtgaccggcttgtccgtaaggttgagtccctccaccttgatggacggtgctgtgttctttttctcaaacttgaccaccggcggtgcgatcttgcgctccagcttttcttccatttgctgctgctcagccgcagtcaccgcgctttgcagcgtcaccttgggggtaacgccggtatgctcagcaatgcgcttggcaagcagctcctcaaagcccatctcctgcaaaaactttgtgccgtggcacacccccaccgtgatgttctgcccggtaatggagatgctgctcctgtccagaaagccgttgatgggcacgccgtcccgcttcatgtcctccagcagggtgcgcagagcgtgctcgtccagcatggcatagccgaacaggtttttgatcttcagttcaaagccctcgtagtccggctgcagggaagccagcagacgggcgcagaggttctgatccagcggggcggcgctgcgcagagtaaactcgacctgccggtcctgccgcagcatccgggcgtgctccacgatcacctgcccgaagcaggccgcaaaatccgggtccgccataaactgcggccacagctgggaaacaagtggtttcacaaatggtactcctttttggtgggttctttacagcacaaactgccgcacccgtttttgcaggtgtggcagtagggaaaagaatacttacaatttatagatctcgtccatgaactgatccagaatgttatcgccggtcagctttttgatgggcttgccgtggatgaacagcacggcctcgcccttgccgccggcaatgccgatatcggcttcgcgcgcttcgccggggccgttgacaacgcagcccatcacggctaccttgatggactttttgtagccctgcagccgcttttccacctcgttggcgatctcagtgcaggggtactgggtgcgtccgcaggtgggacaggtgatgacctccggcccggtgaccgggaagcccacagcgcgcaggatgttaaagcctgcttccacctctttttccggctcggcagccagcgacacacggatggtgtcgccgatgccctccagcagcatcccgccgatgcccatgccgcttttcagcagacccatctggtaggtgccggcttcggtgacgcccacatggagcgggtagtcggtgacggcgctgagctggcgataggcttccatcatgcgtggcacgttagagttcttgatggagatgacgatgttgttaaaatcgaacttttccagcagccgcacatggtacaaagcgctttccaccatggcctccggggtgggtgcaccgtaacgggcaagaatgtgcttttccagactgccgccgttgacaccaatacggatggggatgttcttctgctggcaggcatccaccactgcctttacccggtcgtcatcaccgatgttgcccgggttgatgcggatcttgtccacacccacgtccgcgcaggccagcgctgccttgtagtcaaagtggatatccgccacgatggggatgttcaccgcgttcttgacggcttcgatgcactttgcatccgccgggctggggcaggtgacccgcaggatctggcagcctgcagcttcgcaccgcttagcctgtgccacattgccttcgatgtcctccaccggcacattgagcatggtctgcaccgcaatagggttgctgccgccgatggtcacattgccgatcttcacttcacgttttttctgccgcataagggttcccctttcttatactgtcccggtgatgagccggagaatatcgttgtaggttgcaaagagcatcagcccgaacagcagcccgaaagttgcaagggtgagcacgctttgcagcttttccggcactgtatggccggtgacgccttcaatgaccaaaaatactaccttaccgccgtccagcgccgggaatggcagcaggttgaggatgccaaggttgacggtgatgagcgccagcatctccagcagatcctgccagccgtagctggcggcctgcccgatggccgatacgatgcccaccgggccggagaggttgttgatgctctcccgcccgcgcactaagtccacaagggaggtgaacacgatgcgcccatagtacagcacgctgttgcccgcctcccgcagcacgttgccgggggtcttttccagcccgtagacagaaaagccgatgctcatgtgggtctcgcccttttcgtcctgccatgtgtcaaactgtaccctcggcagatgcaccttttggccgttccgcagcacggtgaaatccgcactgtaggactgggtgcgcaccagctcgtacaagatgtcgtttgccacaaagcagcggcggccgttcaccgccagaaccttgtcccctgcctgcaggccggtctgcccgcagagggcaccgtcctgaatggcgtagatggtcttgctggtgatgggctcgttctgggcggcgatgaggatcaccaacaccacaaagcccagcacaaagttcatgactgcaccagctaccatgaccagtgcccgctgccataccggcgcttcattcagggggacgccggtgggctgcacagatgcttccgtctccggggcgggctgttcctgcacagtatgggcagcttctgcctgctggctttcggggctttcctccccttccagcgctacaaagccacccacaggcagggcacgcagactgtactgggtgcctttatgattctttttccagagcaccggccccatgccgatggaaaactcattgacctgaatgccgcagagctttgccacagtaaaatgcccgaactcgtggatggcgatcaccgcgctgaacacaagcagcgcagcaaggatggtaataataaatgacattcgttctcccatatcgccccggagccgttacaaaaacagcgccggggcgtatattgctgataaagcgttacaggtgtgcccgcacgaacgcgcgcgccatgcggtcgcactcgtacacgtctgccagcgtatagtcgccgccaaagctgtcgctgtccacaacagcctccaccagacggccgatatccaaaaagccgatcttatcctcaaggaacagcttaacggcttcctcgttggcaccgttggcggcgcaggggccaagaccgcccttgcggatggcctttttgcaggcggcaaggcagcggaaggtctcttcgtcagccacatcgaaggtgagcagcttcagggtggtaaagtccagctccggcactacgcccggcacacgcttggggtaggtcagggcgtactggatggggatgcgcatatccggcacacccagctgggcaatgatcgaattatcgctgaactgcaccgcagagtggacgatgctctggcgctgcaccacgatctggatcttttccggcggcagaccaaagagccatacggcctcgatgagctccagacccttgttcatcagggtggcagagtcgatggtgatctttgcgcccatgttccagttggggtgcttgagggcgtctgcacgggtcttgccgcgcagctgctcggtggtcatgccgaagaaggggccgccggaggccgtgagcagaattttggtcaggctgggagcgctctccttatcctgcaggcactggaagatggcggagtgctcgctgtccacaggcagcagctgcaccccgtgcttttccacagcctgcgtgaccagatgaccgccggtgacaaggctttccttgttggccagcgccaagtcatggccgctctcgatggcgcacaggctggcaccaagaccggcaatgcccaccacgctgttcagcaccacatccgggccgtccagcgcagccagttccttcagcccctccgggccggtgagcagcttgggtgcatttgcccggccagccagcgcggcgtccagctttgcggcggcatccgggtcggtcatgcagacatatttcgggtggaactcctcgatctgctgcaagatcttttccacatggctgtgggcagaaaggccgtagacctcgtacccttgggcgcggatgacatccagactctgggtaccgatggagccggtagaacccaacagcgttatttttttagacatgatagtttcctcctctgtatcagacgtagaacacggcggtgatgaccatggtcacgaagggcgcaatgaacatcacactatcgaagcggtccagaataccgccgtgacccgggaagatggtgccgtagtccttgatgccgcactgacgcttgaccacactggcaaacaggtcgccgtagatgcccagcactgcagcgatgcagcccagcagcgcgatgatgacatacatggagaccccgatattagagcgggtaaaggcttccatgcggttagcagccatggagtagatgatggtagcgaccacgccgaacaccatggtgcccagcacgccgccgatggcaccctccaccgtctttttggggctgaccaccgggcacagcttgtgcttgccaaaggcgcggcctgcaaagtaggcgcaggtgtcgccgccccatgcaaagcagaggatgagcagaataaagaaaaccgcgtcatagccgaatttttccaccggtagacgctccttgagcaggataaaggaatagaagcagaagatcacgatgcccgaaaacaccaaaagaccgctggccttctggtagctgatggtgccgttgcgcaccaccagatagatggcaaaaaaagtgaccagcacaaaggacattggcatgaccagcttgcgcatggcactgtaactggaaagcatgaccagcaatgtgtagggtaccagcactgcgtacatgagccagtcctttttttcaaagccgagggcgttgtaaatttcatggacagcgatcagggtgatggctgcgatcaccagattgaacaccatggtgttaaaggtaaacatcacgccgatgagcaccagaatgcccacgatcgcagtaataatgcgtgttttcataggtttcgatctcctttgttcttccggcagcagccccttgcggggcagcgcgctccgacccgaggaagtaccgggtctgccgggtctgcaccatgggcgcagggtttgcaatacggatactgcgccgctcagatgccgccgaaccggcggctgcggtggttgaactcctcaatggcggtgtccagatcggcacgggtaaagtccggccagagcacatccatctccaccagctccgaataggcggcctgccagagcatgaagttggacagccgcttttctccgctgggacgcagaataaagtccggatccttctgtccggcggtgtacatggcatcgctcatcatctgctcgttgatgtcctcggggcggatctcgcctgccgcagcctttgcagccagctgctgtgctgcgcgcacgatctccgggcggccgccgtagttgatggcgatgttcagggtcatgccggtcttgcaggcagagtccccttccagctcgttcatcatcttttgcagtttgggatccagcgcggtgcggtcgcctaagaacttaatacggatattgcggttcttgtagtcaaagccctcgatgaggtactgggcgaacagcttcatgatggcacccacctcttccagcgggcgcttccagttctcggtagagaaagcatagaaatacaccgatgctacgccaagttcatcgcagtagttggcaatatccttaaacacctccgcaccctttttgtgtcctgcggtgcggggcaggccgcggtttttcgcccagcggccgttgccgtccataatgatgccgatggaaagcccttcagcaaattctttggggtgtgtcatttatacctcccggcagcaaggctgcctgcaaaaagtgccgcgcaccttccaccagcgcacggcacctcccaatcgttattgtgtgctgcggatcagacggccatgatctccttctgcttttcttccacggcagcatcaatgttcttgatatacttatcggtcagcttctggacatcctcttccatggtcttctgggtgtcctcggtcagttcaccggccttcttcatagccttggccttatccatagcgtcgcggcgcacgttacgcacggcaaccttggcgtcctcgcccagcttggagacttcctttgccagctgcttgcggcgctcctcgttgggtgcggggaagttcaggcggatggtaacaccgtcatcaatgggggtgatgcccacatcgctggccatgattgccttgctgatgggacgcagcagggtgcggtcccaaggggtgatggtgagggtgcgtgcctcagaaacggccacagcggccaactgctggatgggggtgggtgcaccgtagtaatccacgaccaccttatccagcacggcggggtttgcacggcctgcgcgcaccgcagccagctcgcggctcatgtgctccacagagctcttcatcttatcttcgaaaaccttggtgttgctgctcattgtcgttgttctcctgtttctttattctattgatccatgcaggcagcgcactgcgttgctgctgctctatccaatcgtatgcagttgcaccggggcgctatgctcagccctcgtagaccagcgtgcccacgttttcgccctgcacagcccgtgcgatgttgtccgggtcggccagatcaaacaccagaatgggcagcttgttgtcgcggcacagggtagctgcggtgccgtccataacggccagctgatcctccagcaccttggtaaaggtaagggtatcgtactttttggcatccgggtacttgtgggggtccttatcgtaaacgccatccaccatggttgccttgaacatcacatcggcgctcacctctacggcgcgcagggcggtagccgtatcggtagagaagaaggggttgccggtgccgccgccgaacacagcgatcttgccctcgtccatggcgcgcagagcatccttgcgggtaaaggcaggtgccacctgcggcatggtgatcgaggtgaacacctcggtgggcacacccagctgctccagcttatcagagacagccagtgcgttcatcaccgtagccagcataccgatcttatcagccagcgtgcgctccatcttaccgctggagcggccgcgccagaagttgccgccgcctaccacgatgccgatctgcacgcccagctcgtgggccttcttcacgccgccgcaaatggcgtccatggtgggctcgtcaaagcccatgcccttttcgccgcccagcgcctcaccgctgatctttaaaaggatacgcttatatttcaatgccataatccaaacaccacctgttttatctttcgccggatagccccggcatttttgctatattatattttacaataaaactcccataaagtaaacagtcaaacgcaccgttcttcgcaaagcttttgtgaacgaatgcgcagtgcccgcaaagcctgcttttgttccggggggatgcggtagctttccaccgctttctgaatggtcttgttgtgcgtccacacgtccagccgcttttcggtcagccacggcagtgccgctgccggctgctttgccagtgcagtggcaaaataccacgcccgcatcatattgacatagtattcctcgctgtgcaccgccgccacccaagccagatattccggccggaaggcatcgtccagataataccgcatcagcatcccgatcccgtagcgcacggtatacacttggtcagagcccagccagcgccggatagcggtcagcagttccggcttatgctgcgcaaacaccttggggctgaagctatcgcagactgcccagttatccacatagggcaaaaagcgctcagttgccgccagcgctgtgccgtaatcccggacaggctccagcagaaaggcgtggagagcgttttcttcataataaaaatgcggcagatcttgcacaaacacctccgcttccggggtatctgtcagctgctttgccagcttacgcagcagcggcacccgcaccccgatcaccgtttctggtagcagggtgggcatcaggcggctgtgaaagacctgatattccttatcctgcagcgcaaacagctgcgcacggatcgcatccacttcctgcattttgtcacttcccttctgcaccattgtaccagatgggaaggaaaatgcaaagagaaaaggctccaccttttcagatgaagcctcgcgttatcctatactttttataattgtatgtccatccctgtttatattggctgtttaccccaccctctgccgtttatccagccgcattttatcagctatcatcgcgatgaactcgctgttggtgggttttccgcgcaggttatggatggtatagccgaagtagctgttgagggtgtctacgtctccccggtcccacgccacctcgatggcgtggcggatggcgcgttccacccggctggcggtagtgccgtttttcttggcgatttccgggtacaggcgcttggtcacagcgttgatgtactccggctcgttcatggtgagcagaatggcatcccgcaggaactggtagcccttgatgtgggcaggcacgccgatctggtgcaaaatttcggtgacggtcagttcgtcactgtccacactggtgtggagcaggtgcttttcctgtccgctggctgccttgagcacccgggcggcaaggacgctttcgtcaaagggcttgacgaaatagtaggcaaagccctcgtccagcagttcctgtaccatttcctcgctctggaacgcgccggtgacgaaaaacgaggtgtggcgctcgccggcggcattgtagcgctgcttgaccgccagcgcatccagcccgggcataaaggcatccagcagcaccacctgcgggcgaacggccagcatcttctgtaaaaccttatttccatccttttccacaacggtcacttccacgcccttttgctccagcgcctcgcggcaggcttctgtgatctgagcaccggtatccgacatcaagaatctcactttatccatggttgtttcctccaatgtgtgcagttcctttaataccatggattttaccataattttccagacagttcaacggtttattttgggaaattatggaaatttcgctcgaatgtcctacttttttatgctgccgcatccgttccggacacggaatgtgcctgttccagcatggtttgcgcaaaaatgccgtagcctcgtgtcgggtcattgaccagcacatgggtcaccgcacccaccagccgcccgttttgcaggatgggactgccgctcatcccctgcacgatgccgccggtctgtgccagcagtgccgggtcggtaacgcgcagcaccatattgcggcgcgggtcggcatcgttcaccttttcaatatagacgcggtagctgcggggcgtttcgccgctggtggtggtcaatatctctgccgcgccgggcagcacctcctgcgcaaaggcaagctccgtctgctgcccggcaatggcggtgcttaccgtgccgtagacgccgttttcgccgttgatgcagatcctgccaagggcgtggtcgctgataaatttgcccttcagctccccggggctgccggcggtgccgccggtgcagcccacgatctggcaggccacgatctcgccgctgcgcagggcgacctgctcgccggtgtcactgtcgctgatggggtgacccagcccggcaaacaccccggcctgcgcgtccacaaaggtcagcgtacccaccccggcggaggaatcccgcacccacatccctgcccgccactgggcgttctgggtatcccacaccggcaaaagggtggtctgccgctgctcgcccttgcggacgtagaccacctccaccgccgcaccggcagcggcttccagcgcggcatggacctgctcgttggtctcggtgacggtgttcctcatgcggatgacccggtcgcccagccgcagccccgcctgctttgcagggttcaccgtaccggcggcggtatgcacctcggaaaagcccacgacaagcgccccctctgagaacatcttcaccccaaaaggcgtgccgcataccgtaaccgtagggcgctgcatcacggtggcgcggatggtcttgaccggcagccagccgcccagcgccagcgtagtctgatagctgcccgctgcccgagtgctggccacattgcggctgccgtgcccgcgcagcggttccacccagccaaagcgcggcagcatgagcggctgttccggttccagataaacctgctccggcagggcgcaccacagccagcccagcgccgccacggctgccaccagcagataagcccctatcatctttatccacctgacgatgctgtgcttggacattttacggcctccctgcgcatttttcggatttattatgcgcagaaaagggcgaaaataacagggctttcgcagatgccgctttccgctttagtcccttcccgtaaaaatggaagcccggaagatccgcagaccttccgggcttgctctatctgtcacaaatgatttttccgtagcgcaaaggcgtggcacggcggcggtgcgccttatttttcatcgtgcaaagtgccggtgccgccctccaccacgccgtcatgcttgagcacggcggtaatggtgccaaagaagcactttacatccagcccaaagctgatatgctccacataccagccgtccagctttgccttttcggcaatttccagttcgtcccggccgtggatctgcgcccatccggtcagccccgggcgcacatcgtttgcgccgtacttgtcccgctcagccaacaggtcgtactggttccacagcgccgggcgcggcccgatgactgccatatcccccacaaggatgttccacagctgcggcagctcgtccagactggtcttgcgcagaaagcgccccatgcgggtgatatactgctccgggtcgtgcagcagatgggtaggcatatcgtgcggggtgtcgatgcgcatggtgcggaacttgaggatctggaaatgccgcttgccgatgcctacccgcttctgccggaaaaacaccggcccgggcgagtccagcttgatggcaacagccagaagcagcagcagccacgaaaggcacaggatgccgcaggccgacagcaaaatatccagcagccgtttgatccgattcctatacataaataaaacttcctccgttttctacgggtgtaccgctttattatagcagtatgggcagcatttttcaattgcaggctgtgcccggcggctgatatttggcgattttggaggaagtggacgctttacctcttgttttttacctaatatcgcgctataataggcaattgctatgtcaattcaggtttattataggaggtagataactcatggctacgaccagccgttccgcagacctgaccagcgggcccatgctgcaaaagatcattttgttttccgtgccgctggcggcatccagcattctgcaattgctgttcaacgccgccgacgttgtggtggtggggcgctttgcgggcagcacggcgctggccgctgttggctccaacggtgcgctgatcaatctgctggtcaacctgttcgtcgggctttcgctgggtgccaacgtggtggcagcccggtgctttggtgcccgggacgaaaaaggtgtgcaggatacggtacataccgccgtggcgctgggcttggtcagcggcgtgctgctggcggtggtgggcttttgcaccgcgcgcggcctgctggagctgatgagctgcccggaggatgtgatcggtctttccgctctgtacctgaagatctattttatcggaatgcccatgaccatgctgtacaacttcagcagtgcgctgctgcgggccgtaggcgacaccaagcgcccgctgtactgtctggccgctgccggcgtcatcaacgtggtgctgaatcttgtctttgtcatcggcttttccatgagcgtggcaggcgtggcactggccaccatcatcagccagaccgtgtctgcgctgctggtgaccgggatgctcgtccgggaggagggcgcactgcggctggacctgcggcggctggccttccacgccgggacgctgaagcagatcttgctcatcggtctgcctgccgggctgcaaagcacggtgttcagcctttccaacgtggtcatccagtcctccatcaactccttcggctccatggtggtggcgggcaactctgcctcctccaatctggagggctttgtgtacaccgccatgaacgcctttgcgcaggccgctgtcacctttaccagccagaacatcggcgcacgcaagtaccacaaccttgaccgggtgatccgcaattgtctgctgtgtgtcgtggtgaccggccttgtgctgggcggcggcgcagcgctggcagggaaccagctgctgcgcttctactcctcggacaccgcggtcattgctaccggcatcgagcggttaaggatcatctgcggctcctatctgctgtgcggcatcatggacgtgctggccagcagcctgcgcgggctgggttacagcgtgctgcccatggtggtaagccttgtgggcgtatgcgcactgcggctggtgtggatcgccaccattttccagctgaaccgcaccccctttatgctgtacatcagctaccccatcagctggacgctgaccgcactggtgcatctcggctgtctgctggtagtgcggcggcatctgcgccagaaccagcagcagacacaggcggcataaagactgccacacacatttctacacaacagcttttccagatttaaaatggccgccgcgtgcgctttggccatattcagcggaatagattattataatttcggactaccggagcgtctgcggacgctccggtagtccattttcacagaaaaagttataaaggcaacatcccctcccataaaaagcagttccgaaacacccgcaggcgtttcggaactgcaaataaaaaatatttttcctctgacgttgcccaaagcaaagcggagggcatttgaaatcttctcaccaaaaaggactgctgcgtcaaacgatgcagcagtccttttttcacagggccacatccagtgccatcatcagcgcaaaccccagcacgatgctgatgacaccggccacttcatccggttccaccgcctcaggaatcatctcctgtgcggtcacacacaccatacagcccgccgccgcactcatgagccacggcagcgctgcacctacccactcggccagcacaaaggccagcaccgcgcccaagggctccaccagcccggacgccgccccggcggcaaaggactgcccccgggtgcgcccgctctgggtcagcggcagactgaccgccgcaccctccgggatattctgcaagccgatgccgagactcagcgccagcgctccgcttacggcgtctgcgtccccgtgcagcgccagtgccgcagcaagccccaccaccatgccctccggcaggttgtgcagggtgaccgccagcaccatgcgcccgcaatgcccggggccgcccgccagcagctgcccggcggcatcctccagtcgcaaaagccccacagcacctaaaataagccccagcgccgggggcacccatgctgccctgccctgcgaccgggctatggccggcagcagcaggctccacacgctggccgccagcatgatacccgccgccattccgcacaaaatgcgccgggtagccggtcttgcctgcctgcgcagcaaaaacacccctgctgctcccagcgcggtacacgccgccggaaacagccagaccccaagtatgaaaacgatccggttcaaaccgcattccccctttgccctttgtatgcacaaacgggcaaaaaggtgcggtttcagaatgcgatagcttcctcttcgctgccatagggcaggccggtgtcgtggttcatgggcggcacggccgctgcggcgtctgcctttaccttgcagatcacggcatcgcacaggatgtacttcacctttgccacagcggtgttgccgatcttatcgtacagacggcctgcactgtagcagtccccctttacggtatgggtgctgttggccacatagcccaccttgcccagacccggcagctctgcccggatggcttcgcggtcggcctgattctccggctccttgaccagacgcaccttctgccctactgcaaagggcatcgtgccgtagcggtagttcaggccggtcagtgttacataatacttcatggttttacctccttagaaatcctcttcgctgctgtcgcagctgtctgcatcgcagtctgtgtcatcggacgcaaagctgtcggtgctgtccgtgctgaaattgcgctcgaatgcggtcatgtactgggcatagccctcatcgccggtgccgaagtagccaaaatcaaaatctttcatcgtattatcctccgcaaatgttcttgtcgttcaagccttccggggatgtccgtccctcgttatgcttctattatccacatttgcagtccaataaaaaggattttcggcagatcatttcaagttttttctactttgtgttccccgcccggcggtgcaggctttgctctgtacccacagcataccacactctgccgggtaagaggtcaactgccgggcgacattctgcaaaagcgggttctacagcagatagcagcccgtcttttgcagttttatttttgccaaaaagtcttttacttttggcgaaattttatgacaactatgtagattctttacatagattataactttcgaccaaaatcctcttgatttttttcaaaaacggattagaatatagcatcgcagtgaggtgttaccgaaagcccgctgctaaacatttacaagaagactaaggagatcattgatatgaaactcaagaatatttgcatcgctgttgttgctctggctctggctgctggcatgaccgcttgcggtggctctgcttctaccgctgcttcctccacctctgaggctgcttctgcaagcaccgctgtttccgaggctgcatcttctgaggctgcttccagcgaggctgcttcctctgaggctgcatcttctgaggccgcttcctctgaggctgcttccagcgaggctgcttcttctgaggctgcttccaccactgccgcctaagtttaacgcgcacagcgtacataacaggatagcaaaaggccgctgcacatcgttttgtgcagcggcctttttggttgcgcagaaagattataaatgccctccgcgtgcgctatgggcataatcagcggaatgattttttcttttttcgggataccgggtcatctacggacgccccggtatcccattttatgagaaaagaccgccgcacaaagccatgtacagcagtctccttacgtttgagaagtaagcttcccagtatcatttttcaagaatcgcgcggatctgggcaaggtcggcagcaaaggcgatgttccgctgccgcgccggagtagaaagccccatggtgatcatctgctgcaaaagctggtgcaaaggctggtagtagccgttcaggtcgtagaggatgcagggcgcgtccaactgccccagcgacagcttgctgatgacctcggtgatctcctccagcgtgccggtgccgccggggaacgcgataaaagcatcgcccagttcgatcattctggtcttgcgggcggggatatcctcggtcacgatcaactcagtcagtccctcgtgctgcaactctgcgtccagaaagcacttgggctctacgccggtcaccctgccgcctgcggccagtacactgtcggctaaaagccccatcaggccgcttttgctgccgccgtacaccagcgcattgccgctttcgccgatccagcgccccagctgctgcacagcctgcggcaatgcagggtcggtgccaaggcttgcgcccagatacacggtaatgttcattgcagtatcctttcttgccgggtcagatgctccacagcaccgcgcccagcaccgcagaaagaaggatcatcccgatgggggacggcgctttctgcgttttctttttataggcaaaatgcaggatgcccagcagggcaaacactgccagcgcacgcacatccggggcaaagccgccggaaacagtggtaaagccccccagcgtggaaagccccatggtgtaggcggtggccaggatcatagccaccacgcaggggcgcaccccggccagaaaggcgttgaccccggcatacttcatcaggctgtgcagcgccgccgcgatgagcagaatgatgacaaaggagggcagcaccacccccaccgttgccgcaaaggagcctgccagccccgcctgcgaagccccgatgaaggtagccatattcaccgccagcgggccgggggtggactctgacaccgcgataaagctgagaaactcgctctcggtcagccagccgtgccccagcaccgtttcccgcaccagcgagatcatgccgtagccgccgccaaaggacaccgcaccgatgacaaggaagttccagaacaattgcagcaggatcattttgtgccgcctttcttcccctgccctaccgcgtagaccagcaccccggctgcgccgcaaagcaaaatgcagcagatggaggaaaactttaccgccagcacagagcagcccaccatggccgccagcaccaccgccaccactgccgtgttgaagggggtgcgctgcagatttttgagcatcttgacccctgcggataggatcaagtagatgacgcaggcctgtatgcctttaaaggcatttgctaccaccgtcagctgcaaaaagcggtcgaagaagagtgaaataagatagatgaccccgaaagacggcaggcacaccgcaagggtagaggccgccgcaccggctaccccggccagcttatagccgatgtaggtggcgctgtttaccgccacagggccgggggtggactcggcaatagcgaccatatccagaaactcctcccgggtgagccagcgtttttcctccacaaattcgtgctccagcagcgccaccatggcgtagccgccgccaaaggtaaaggcaccgatcttaaaaaaggtgccgaacaattctctgattttggacataggcatttctcctttggacgtttactgcttgaccggctccagttccagatagcactcgaaagccgttttgtccgcgcgcttggcaataaagtaccagccatcatccgaaggcgcgtagaacacctccacctgctgccccatggggacttcgcggtgatagttgatggaagcgaactttacaacgtgatcgcgcatgatctccagcggcagcgcgtcacagacgatatccagataaaaagcgttgttgatgtgatagtgcaggtcgcactgggagtagcgcgccgtaaacaggccggcgctggtcaggctgtcccggcgcttatgcagcaaaaggggcagctcctctttcactgtctcgttccagtatccctctaccgtccagcccggctggcgcaggatgtgtccattctcaaggctggacataatccagcggctgtccaccatggctacttcctgcccggcttcgtccgtaagggtggtgacgcgcttgatggaaccgcggagtgccttttctgagcgggagcaaagggtcaaagtctcgccacggcggggcacgcggctgaaccgcagcgcctgcttgcccaccagaaacgctacaccgtgatcctcaaagaacttatcgtccatgccaaagtggcgggcgtgcatggtggagatctgctccacatagcgcagcagggcgctggccttgagcaggctgtggcagtctgcatcggcattttctaccacggcggtgccttcataataaaactgttccatagtctttccctcctatcggaaaaaggccgccgcaccacgtccgggacggcagccttggttgaacgatcaatactgattgcgggtctttctgcgcaccttgcgccagatattgaagcaggccagcgccagcatggccagcagcaacagcaaaaacaggtagctgccgccgccttcatcgtagctcttcatctcgctccacttcaggtccagttcgctgttcacctcgtcgctcagggcggtgaataccttctcgcgggcggcgtcctcctcagacggataggcgatctcgctggttttcagatcctcgtccagcacctcccatacatcgtgcatgggggtggtgtagccgatatactcgctgttggccttgccgatgtcggtctcgcacatgaagttgatgaacatctcggcggcttccttgtgctcgctggcggcgggcacagccatgcagtccaccgaaagcacactgccctcctccgggaacacccaagccagatccgggttatcatcgatcatggtgatggcatcgccggagtagtacacgccgatagcagcctcgccgccgatcatcttatcaaagatctcgtccatgacgtaggcctgcaccagcggcttctgtgccttgagctcttccaccacctcgtccacctcttccggggtggcggggttgatgctgtggccgctcttgaatgcggcgatggcataggcatcgcggctgttgttgaacatcaggatgttgcccgcatactgctcatcccacaggtctgcccagccggtgggggcttcgtctaccatggtagtgttgtagatgatgccggtggtgcacagcatatagggcacggtgtaggcattttgcgggtcatagtccgggttgcggtagcctgcatcgatcttttggaaattggggatattgtcgtagtcaaggggtgcaagcatcccctcgttgatcatctttgccaccatgtagtcggatgggatgatcacatcgtagttggctgcgccggacttgagcttggcgtacagggactcgttggagtcgaaggtagtgtagtttaccttgatgccggtcagcttttcaaaggcggccaccacgtccacactgtcatccgagccgttggagatgtactcgccccagttgtagacgttcagggtgacgttctgccccttgaagcgggtccagtcgtaagcgtccgacaccgagacgtcctcagtgacctcaatggtaccggcggcaaacaccggcaatgcggcgcacagcgccacagccagcgtcagcagcaatgcagcaatgcgtttcatcatgcgccctcccctcgcagcgttttctgatccttgcggtagctgcggctctccatggcattggacaccagaatgacgctgaggatgaccacaaacatgatggtggacagcgcatagatctccgggctgacctttttgcgggtcatggagtagatggcaatgggcagggtttccaccgtgccgcagttgaagtaggagatcatgaaatcgtcgatggaataggtcaggcagatgaggaaggccgacaggatggcgggactgatctccggcaggatgaccttgaagaaggcctgtcgggggtcgcagccaagatccagcgctgcttcgtacagtttgatatccagctgcttgagcttgggacttacgttgaagataacgtaaggcacgttgaacgcgatatgcgcaatgagcagcgtaggcagacccatgatgttgtccggcagccatgcagactgcgcagcaaagcgctggtaggccacgaacagcagcatcagggagatgccggtgatgatctccgggttgaccaccgggatataggtgatgttggtcaccagcaggcggcttttgcggctcatggaggcgatgccaaggctggctgccgtgcccagcaccgtggcgatgatggcagacaggatggccacctcaacggacacccacagcgcatggaggatggacgcattcgtgaacaggctgcggtaccatttaaaggtaaagccggtgaacagcgagtagcccttgctctggttgaagctgaacacgatcatgtaggcaatgggcagatacatgaagcagaagaacaggatgatgtagacccgctgcatcaggcgcagatgttttgttttcatcaggatacgccctccatttcatcctcgtcaaagctggacgtaaagctcatgcacagcagtacgatgatcatcagcaccaagctcatggcagagccgacgttcaggttgtagctgttgcccagaaactgcatctcgatcaggtcaccgatcagcaggttggagccgccgcccagcatacggctgatgacaaaggtagacaccgccggcacgaacaccatagtaatgccggtgctgatgcccggcacgctcatggggataagcacccgcacaagggtcttggtggtattcgcgccaagatcctgtgcagcttccacaaggctctggtcgatcttggtcatgctggtgtacagcggcaaaatcatgtagggcacatagttatacaccatgcccagcaccaccgcaccggaggtgttgagcatggtataggggccaaggccgataaagcccagcagggtgttcaccgggccgttgacgctgagcagacccatccatgcgtaggtgcgcagcagaaagttcatccacatgggcagcatgaccagcataagcatgatgtgctgcttgttcacccgcaggcgggacaaaaaatagcccaccggaaaggcgatgataaggcagatgaccgtagcaatcagcgccagcagcaggctgcgggcaaacaccgaaccatagccgctgatggaggtaaggttattcagggtaaagttaccctcggcgtcggtcatggcgtagtacaccacaatgaacaggggcacaacggtaaacagcaccatccatacaaagtacggataggccagctttttatcatagatcttcatggcacatcacccctcgctccgcgccatgatatggatctcgttggggccgatgcgcataccaatggtctcgccgggggtgcaggcacgggtggagtggatcagccactcgcggccctcgcactcgacgtgcatctcaaagtgcacacccttgaagatgacatcgttcaccacgcccacaagctggccctccaccggggataccacctcgatatcctccgggcgcaccaccacctgcacgctctgctcccgggcaaagccgcggtccacacaggggaaatccacgccggagaaagacaccagaaagtccttgtgcatcacgccgtccacgatgttggaatcgccgataaagtctgccacgaaggcgtttttcggctcgttgtagatatcctccggggtgccgatctgctgcaccttgccgccgttcatgaccacgacggtatcggacatggtaagcgcttcctcctgatcgtgggtgacatagataaaggtgatgttcatctcgcgctgcagccgcttgagttccagctgcatctccttgcgcagcttcagatccagtgcacccagcggctcgtccagcagcaaaatctccggctcgttgaccagactgcgggcaatggccacgcgctgctgctgaccgccggacatctggctgatgctgcggcgctcgaagccctttaagcccacgacctccagcatatcgcgcaccttgcggcggatggtgtcctcgtccagctttttgagccgcagaccaaaggccacgttctcgaacacattcaggtgcgggaacagcgcgtatttctggaacacggtattcaccgggcgcttgtagggcggcacaccggtaatgtcctcccctttcagcagcaccttgccggcgtttggctccagaaaacctgcgatcaggcgcagggtggtagttttgccgcagccggaggaaccgagcagcgtcacgaactccttatcatggatatccagattcagcccatccagaatgcgctgtccatcaaattccactacgatatcccgcagtgaaacgaccaccgagttgtccattttatatgttatcctccttgttctcagatacgaaaaaagacaggaagcctgccccatcttttttgcgtataagggatgctccgccccgcgcagcagcatgatcttgtgcggcggacttaccctgtcacggtttataataaacaatcacagtcggattgtcaatcactctgccgatgtttgctgaaactttataaaaagctgcaaaaaatatacgctgcaccttggttttggtgcagcgtatcaaagcaattattcctgcgttttcaggtcgttttccgtcagcagaagcgcctgcacagcgctggtatccactgtgtataccgaaggttccccttccacctgcagataccacccgtccgtgccgcaggcgtaggccagctgcacggtggagccatcctcgctggtaacggctgcggtgaataccggtgcatcaaaaccacaggcggcaaggtctgcgtccgtggcttgggcggtggcataggtgcacagagccgacagcaggctttgcaccttatcctgcgcaagactggcggtggggtcagaggccagccgccacactgtctcgtaggcagaggaagagacgctgtctgcgtccgtgctgtcggcgctttcggtcggctcgctgacggcgttcagggtgacagaggttccatctgccagcgtgtaggctacctgcgtgatggcagaagctgtaagccctgtggggcagaagctgccgaaaagcccggccttatccagctggaagcaggcggctttgttgccgctgacagtgtagatggcatcgtccccggctttttgcacataaagatccccggttaccgggttctctgccccgaaggtcaaagtggtgctctgccctgccgccgttaccgcaacagtgagctgcgggctggacagcccgtagtcctcccctgcctgcggtgtcaggctgcgcttggcattcagtgccatcagggcagtgcgcatggtgttgcaggcgctttcgtccagatgataggcggggtcctgtgccagcagccagctgccgccggaatattgcagagtgtaggtctcgccgttataggtgtactcgatctgctccaagtcctcggcggcaaagctggaaagcgggatgctgccctcagcggcggcgctggcggcctgctcggctttttcattgctgcgggtcatcgcccacagcaacgcgcccagcagcactgccactgccagcagcgccagcaggacacgctgttttgttttcatggcggtctccttatctgcggcggcgcagcagcaccaccactgccccggcaatgagcaccgccgccgggagcacgaacacaaaggtcagccccagtgcagcggcggtagagcctgccaccgtgatgggctcggcttccagcgccttggtgtccacaaggacatcctgccctaccagcgaagccgcgcagccctgtaaaaaggtcaggttgccgggcatggactgataaagctgctcgttatccatattgggacagccgatccagaggacctcggcaccggtatcctcgttccgtgcccagacagccagtgcaaaggggccgtctgtgtccccgtcctcccgctccatggtggtaaggtcgtcgatatcagccttggcataggcagcggaggagctgttcagcagcggctcggcggtgacatcctcggtctcggtgaccgtgatgccctgtgccactgacaacatgacatgggtattggtgttcacgccgttcagcgcggtgctctcggtgggcgtgccgtagtccggcagcagcgaccatgcagagttatacagcgccttgctgctgtcgccctccaccaccatgccctctgcgcgggcaaggccgaactgcgccagcacagcgtccagctgcggggtctgggcgtagacgctgctggtcagcagcagcttgccgcccgccgccagataattttgcagctggctgatctcatccacaaggccgtcccctgcggtaaaatcgctggtgggcgcgttgatgataagcagattgcagtcctccgggatggtgctcgtgagcagatccagcggctgggcgtcgatattctgggcatccagtgcatcggtcagggagtcggtcagggactgctcgccgtggttggtggtatagtaggcgtggctctgtccggctgcggtaagcttgtagatggcagatgtgatctgcttttcgccgccaaaggtcacgctggcagagccggtggtgtagtagtcggtgtagtcgtactcgtacaggttggcggcatccagcacggtgccgttctccccgcaggtgacgatcagactgccggtggaaacattctccgcaccgtactttgcggcaaaggtggggtacagggtggggtccttctgttcccagctcaggtgcccgctctcggcggcgtagtgatccagcagctttgtgatgatggcatcctcgctgccggtctcacagaggtaatagatgtgcacatccttttccagcccctccaccagtgttttggtgctgtagctcagggtgtacattttggcttcggagaggtcgaactcggtatattttgtggggatcgcccgcaccagcaggttgagcagtaccgccagcatcagcactgctgccagcatggcggtggacagcagtccgctgcggaataccctgcctttctgagaggatgcgttcttgttccatttcatcattgcggcctcctctcagttccagcggcgcttttccagcccctgcgcggtgaagaacaggaacaccgccgctacggtcaggtagtagaccagtgtggggatggaaaagctgctgttgaaaaattcttcaaagggggtaaacaggcacagggcgctgagcaccgcactgaaggcttcggtcagccagctgctcttgagcagaaacaatgccgtaagcgccacgcagcaccccgcaaaggaaagacagcccagcgtaaagcttttgctgcgcagccccgccgccacgctgagcacggcggcaatagcggtaaacagcgccagtgccaccgcgctgccggtagtgaacatggtgcgcagactgggcatcatataagccagcagcagcgccgccacaccggatacggcggcgatgatctgattttcggtcaggctggaaaggaataccccaatggcaatggcggcgcagcccatgaggtaatagcacagcagggcagaaaagttggccagcgtgctggtgccggtagcgcccagcaccttcagcacaaggatcatgccagcatccacaaggcagggcagcgcaaaaatgacgcaaagggcaaaatatttgcccagcacgatgccgcccaccgacaccgggcttgtgagcagcagctggtcggtgcggctgtggcgttcctccgcaaaggagcgcatggtgagcaccgggatgtagagcagcagcacaaaaatggtgcggtacagcgtgtagtagccaaaatccggcagaccgtagcccagattcagcgccacaaagtagatggccgtagccgccagcataaaagcggtaagcaccgcaccgatcatgccgtgaaagcagctgcggagctctcgtttaaagatagcagccatctcagttcccctccccttctgccggggcttcctgctccggcgttttttcggtcagcgcaaggaatacctcctcaaggctacggttctcggcagcaagcgccagcacggtgcagccggcctcggtcagtgcccgggacacggcagcgcggcggtcggcggcatcctcgctctcggcggtaaaggtgacctgaccgtccgcagcgctttccagttctacccggcagatacccggcacgctgcgcactgcggcaagcacggtgtcagtctcgccctgcgcggtagcgcgcagacggctgccggggttcagggtctcgcccagctcctccgggctgccaacagccaccagacgtcccttggagaggatgagcacctgctggcacaccgcctgcacctcgctgaggatgtggctggacaggatgaccgtgtgcgccttacccagttcccgaatgaggttgcggatctcgatgacctgcgcggggtccagccccacggtgggctcatccagaatgatgagctgcgggctgcccagcagcgcctgcgcaatgcccacgcgctgacggtagcccttggacaggctgcggatgacccggggcagcacttcctccagcccggtgcggcgggcagcagccagcacctgttgcttgcgctgcgcacgcttgacccccttgagctctgccacaaagtccagatactcctgcacggtcatttccgggtagagcggcggttgctccggcaggtagcctacacaggctttggcctgctgtgcctgctccggcagacggaacccggctaccttcacctcgccctcggtgggtgccagatagccggtgaggatattcataatggtggatttgcccgcgccgttgggccccagcaggccgtagatctggccgtccggcaccgtaaacgagagatcctgcacggcagggcggctgccgtaggacttgctcaggtgagaaacttcgatcacagcaaactctccttttattcagaagctgttttgcggaaagcggcatggacgcagcgctttccggtttggaactgctatagtttagacggaaaatgtgtttaaattaagacaatcctgtgtgggaaaacgaaacatttgcccgcgcaaaaagcaaaaatgccgcctcccgaaggaagcggcatgagatagcctataattacttacggccgaaacgcttgttgaagcgctcaacacgtccgccggtgtcaaccagcttctgcttgccagtgtagaaaggatggcacttggagcaaacttcgacgtggatctcgggcttggtggaacgagtcttgatgacattaccgcaagcgcaggtaatggtgcagtcaacgtagttcggatggataccctgtttcattcttttcacctcaattctggttctgacgtattggggccatatttaatgtatgtgcccatcacaaccttcaatatcggctaccccgtcgagcggccttggaaacgattgccttactattatagcacgaatcggccggaatgcaagagggaaatttaagtttttacagcttttgcagcgtccagccctttttttcggccagctgctccagctcccggtaagaaagccgcagctgcgcaatgttgaagcccggcagctctgcaaggcagctgccgtcctgtgtccggtgcagcagcttgcgcaccggcagttcctgctcgccgtccagcgtatccagcccggtcacatattctccacaccggggcagcggctgctgccagtcaatggttttgcaggcccttgcaagcgtaagatggttgcaggtcaccgtctgccggaattccagtttcatgatgttctccccttttgcgccggagattcacagctgttcccgacgcgattctatgatataacattttgttttatatgtcaatataacatttcgttatgcctatactttaccttgaataaagcctttgaggtaagcaccatgtatcaacgtatccgagatctgcgagaggatcgtgatctgctgcaaaaggatgttgcggcgtatctgaaatgcacacaggtctgctactccaattacgagaccggcaagcgggatatccccaccgaggtgctgatccagcttgctcacctctaccataccagtacagattatatccttggtcttacggacgacagcgccccgcctatcccccgtaaaacataaaaaccgcccccgaagcagcacggtcttgtgcgctgcttcgggggcagtctgcttttgttctattataaggttactgctttgcgctttccggggcgacctcaaagtcgatcttgcccagattgacgtctgcgcgcacgatggtgatcatcatggtatcgcccagattccagttcttgccggaaacagggtcggaaaggcggacgccctcggtgagcatagtgccggtggcggtcaggctggaagcgggcacaaagccctccacgccgttttccagttcgatgaacaggccgcgctgggtcacgccggagatgcggccctcgtagcactcgcccagatggcggcgggcatactcggccttgtagcagtcctcggccttgcgctcgatctgcatggcgatcacctcgcgctcgctggcctgcttgctgacatcctcggcaaactcgctgtagcgcaggatcatggtgtccttatcggtacccttgagctgggcggtcatgatgcggtggatggccaggtccgggtagcggcggatggggctggtgaagtgggcataatcctgcagaaccagaccgtagtgacctttgggcttttcctcatacacagccttagacatacagcgcagcataccggtgttgatgatctgctcataggcagtgccgcgcacgccctccagaatagcgctcaactccttgggggtgggcacgtccttggcaaagtggtcgttgacgccgcaggcctgcagcagaccgtgcagacgctccagcttttcggcgttgggctcctcatgcacgcggtacacaaaggggatctgcttcacccgggcaaagtgggcggcgcactggtttgccagcagcatgaactcctcgatcatggcttcgctctcgccggaggtgcgctttttcacatcgatgcagtggccgtcctcatcgaggatcagctttacctcgccactctcgatatccatgcagccgcgctccttgcgcaggcgggcacggtggccgtacagctccttcatggcaggcagctgtgccagtacctcgtggtacttgccggtcagctcgtcatcggcgttgccggccagcagggcgttgatctcggagtacacgcccttgacccggctgcggatgacggacttaacaaagcggtaatcggtcaggttgccgtccttatccagccgcatcaggcaggagaaagccagccgcagcacgccctcgttcaggctgcagatgccgttggacagctgcttgggcagcatgggcaccacctgatcggcgtagtagacgctggtagcgcggctgaaggcttcgttgtccagctcggtgccgggcttgacgtagttggaaacatctgcgatatgcacgcccagctcaaagccgccgtccggggtcttggtcaggctgatagcatcgtcgatatccttggtctcggcgctgtcgatggtaaagatgggcagagcgcgcagatccatgcggccctcgcagtccgcagcagacacctcggcgttgtccagctttttggcttcttcccgcaccttgtccgggaagcggctgcggatatcctgcgcgtagagcagtgcctttgcgcagcgcttggcttcgtcacagctgccaaagcgcatggccacgcccacgcggtgatcctcctgacggttgccgcgcagcaggatctccactgccaccttgtcgccgtccttggcgctgccttcgcagtcccgcatgacctgcatggagatagcggggcaatcgtccggtacgaacttcaggcggccctccatgcggtgcatggtacccaccagcgcgttcttctcttccagaacagcaaggatctcgccctcatcgctgccctctacccgggggtgtgcaaacttttccaccagcaccttgtcgccgggcattgcgccgcgggtgaaccggccggggataaagatatcgctggtgccgtcctccagcatgacaaaggcaaagtttttgcccagctttaccaccttgcacagcagtgccttgtcggcacggccgctgcgcacggtgaagaacacgccctgacgctggcagatgacggcctcgtgcaccagctggtccacggcctccatcaccttgcggtctgcgccgcgatccccgccgaacttatttttcagatcctttacggtgcacggctgattctggatcgcgtgctcaattttatcgcgcattgccataaaatattttctccttcacttccgtggccgtgcatctcctgcggagcacagccctgccttgggacgggcgctttcccctgtcccctctttgcggcagcccgcagaaccggctgcccgcacttttttctgcacagaaaaatagccccgtccgttcacggggctgcaacgccttctcagcctgccagacggcctgcgaacagacaggccagaatagcgaccacaaagaacaccacgcctgcaatgcgggtgaccttagccagcatctgatccgccggggtcagacgtgcattgttggcaccgcccacgctgccgttgatggcaccggacagaccctgaccgtgggtgtgctgcatgagggtgaggaaaacgatgaccagcgaagccaccagcagaatggcaccgccaacaatttcgataacagacatgaatcgtaacgctccttttatttgtaaatacggaaatccacgcaaaaacacaactatatagtagcataacaaagccaaaattgcaagcggaatccgcgcatttatcccgccgcttccagcgcggcgcacacctgtgcaaagatggctgcaccggaatacgccgtatgcaccgcaccgtcctgcaatactacaatggtatagcggggcttttctgccggccagaaccccgcaaaccacaggttgcagcgctcggtgccctccggggtgaactgcccggtctgggcggtgccggtcttgccgcccgccccgccggaaaccccggcggcatcctgcgcggtgccctgctgcaccacctgcactaacatagtgcgcaagagcgctgcgctctgcgccgggagcacccgccgtccccgagggtggctaaggggctccaccggctgcccggtagtctcgtccagtgtagcttgcagcacaaaaggggcgcggtatattccatccgctgcaatcgtgttgaacagtgccgccacctgcatgggtgtcgccagcaggctgccctgcccaaagctgaaattagccagctgtccgctttgcgcaagctcctgcggggcaggcagctgcccggcatcggcggcaagcccttctgccagcggcaggctctgtccaaatccgaacgcctgggcggcgtccaacagtttttccgcgcccagctgctgccccaggcagataaaatagccgttgcagcttttttccagcgcagcggcaaggtctacctgcccatgcggcaccccgcccgcgcagcggaagatctgcccatccaccaccaccgcgccggtgcactcgaaaaccggctgcaagcccgcttccagtgcagccgccgccagcaccggcttgaacaccgaccccaccgcatagctttgcagcgcccggttcaggaaggggctgttcgccgcctgcaaactgtctgcaaggtgctccgggtcgtagcccggcacactgacgctggcgcgcaccgccgccgtggcggtatccagcaccagaatgcagccgctttgcatagtggtgaacgccaccgcttccaccgcccgctgcaccggacgggagatggtcagctgcacacccagcgccccgctgtcggcttgcaaaagtttgggcgtctcgccggtgcgcagcgtaccctgcgctgtgacggcgcagacaaggctgctgtgctcccctgtgccggaaagcacggcgtccaatgccttttccagccccgcagcgccgtgacctgtgctatccagatagcccagcagatgctgacacaacggcactgcggcataccgccgggcggtggggtaaccggtcagtccaaggcgggcggggtcgcagttcacctccagcaaaaacggcgcagcgcggctgcggctgcggtacaaaagcgcctgcccggcggcgtccgtgcaggcatacagccggtcgtaattgccctgcccgggaaaacacaccacctgccagcgctcctctaacccggtgagcagctgcccctgtgcatcgtaaaagctgccccgccgggcgggcagctgcagggtgaccgtgctctgcgccgccgcccgcgcggcataggcggggtgctgcgccagcagatacaaccggcacagcaccaccataaaccccagcagcaaggcagcatacaccgccagcacccgtttgccggacatccccgcgccccctttccgtatggttagggtgggcagcaggggtgcagggtatacataaaaagaggtggaacctctccgaagagaaattccacctctctggcgtatcttattaagaaagactggtacggattagtacataccgcccatgtcaccgccggcaggtgcggcgggagccgggggttccggcaggtcagcaacaaggctctcggtggtcagcaccatctcagcgacggaagctgcattctccagagcggagcgggtgaccttggtcgggtccacgatgccagcggcgatcatatcctcgacaaagacctcgttctgggcatcgaagccgtagttgggcttgttggcagaaacgatcttgtcgatgatgacgctgccctccagaccggcgttcttggcgatctggcgcagaggagcttccagagccttcagcacgatcttggcaccggtgcgctcgtcgccttccagcgtgtcgcacagagcgcgcacagcggggatcgcgttgatgggagcggtaccgccgccggccacaacaccctcctgcacagctgccttggtagcgttcagagcatcctcgatgcgcagcttcttgtccttcatctcaacttcggtagcagcaccgaccttgatgacagccacgccgccggccagcttagccagacgctcctgcagcttctcgcggtcaaagtcgctggtagcggcctcgatctggctgcggatctgggcaatgcgggctgcaatagcgtccttgtcgcctgcgccgcccacgatggtggtgttctccttggtcaccttgacctgacgggcatgacccagcagctggacggtagcgtccttcagctcgtagcccagatcagaggagatcacggtgccgccggtcagggtagcgatatcctgcagcatctccttgcggcggtcgccgaagccgggagccttgacagccacgacattcagggtgccgcgcagacggttgacgatcagggtggacagagcctcgccctcgatatcctcagccacgatcagcagcttcatgccgttctgcatcacctgctccagcaggggaaccagatcctgaatgacgctgatcttcttatcggtgatcagaattgcagcgttgtccagatcggccaccatcttgtcggtatcggtgaccatatagggggtcaggtagccgcggtcgaactgcataccttccacgatctcgttgtaggtctcggcggtggtcttgttctcctcgatagtgataacgccgtcagaggtgaccttctccatagcctcggcgatcaaacggccgatctcggggtcaccggcagagatggtgccgacgcgggcgatatcgttgctgtccttcaccttctggctgtgtgccttgatggtctccacagcggtggcaacggccttgctcatgccgcggcggatatccatgggatttgcaccggcggtaacgttcttcatgccctcattgaccatagcctgtgccagcacggtagcggtggtagtaccatcgcctgcggcatcgttggtcttggttgcgacctcacgcaccagctgtgcgcccatgttctcgaactcgtccttcagctcgatttccttcgcaatggtcacgccatcgttggtgatgaccggtgcgccgaactttttgcccagcaccacgttgcggcccttggggccgagggtgatcttaacggtgttagccagggtatcaataccggcacacagtgccttgcgagcgtcctcgccctgcttgatctgctttgccataatacatcgctcctttataatacaagctcaattgaaaagggaaaattcagtttcagtcttccacaacagccagaatgtcgctctggcgcacgatggtgcactcttcgccgtccaccttgacctcggtgccggagtacttgctggtgaggaccttgtcgccgaccttgacggtcatcttgacttccttaccgtccacgacaccgccggggcccaccgcgatgacctgcgcgacctgcggcttctcttttgcgctgccggtcaggatcaggccacccttggtggtctcctcaacttcaacagtcttaatgacaacacggtctgcaagaggaatgatcttcataattcttgccctccaattatattgaatttatttgaaactttgttgcgtcctgcgggggcttcgtgtgtgctccgcagtggtttagcactccttttctctgagtgctaagtgtattgtactcatcttgccctgaaaaatcaagaggttttgcgatttttctttgttaagaatttatgacgcccaaaaatcgcactctgccacgcaaaaaagcggcgcatccttgacaggacagcttcaacagcagacgtgtcaaagtgctgcgttttactgtcatagtttctgcactcaaatttgttcggagaagttgctcgacggtggtgtataaagctcacttattgccatatgaagctacatccccgcttttccaggcataaaaaagaagccgccgattattgactaatcgacgacctcaaagtacatcagagcgtaaaatattcacttttttctttataagtgattaagctcacttatttcagtttgtaatgattttcagtgattataatcacttatttttaccaaatgatagcttcacccaaaactctgggtggcgtaaaaagctcactttttctaagtgaacataatcacttatttccaatagccataaatgagcttaatcacttatttttatcgttcataggtacaaaagtgattttattcacttgttgagtagacttgtccgcactgtcgcctgcccacccggtcaccttccaccttgctgccttgcaagcatcctggattctgacccgattggctgccttttgccgacttcgccacacacccctcacagcgccccactgtcgcgtttaattggcgaggccgaggaactttccgcagcggacaattcttcgccacacaggggctttgtggggcttggattttcgtccagagctttcccgttttccaccaaaaacggaatgtccagatcgaaactcacaagttgctgtctgggaacgcttttcccctccagacgatatgtattgttccggttccaccgcatgtcccggtagatcatccgcaccaacgccacgcacttgatctcgcagctgttgctcacagtcagcttcggtgtcttatgagctcctgcatcctcagccgtacagttctgcacagctacctgttttgcctctcggttgtacagaaagcgatagtgggttggccagcctaatgcttccaacgtgctgcggaagattgtgatccttccatcctcgacattaaaagtcagacccagcatccgctggttccatattctttcgttcactactctcccctccttaaaaatgggcgcacttcccccttggaatcctggtggccgttttaatcaagcccggtgtcggggacggtcttacccgtcagcatccccactgatacatagccatccatttgcttaacttcagattctttcagatgttcttctacaggtacgccaaaagtacccgcaatatcatctgggtaaaatccctttctggtatttgcaggctttgtctcttgcgcatttttctggtctgtttcattttttcgcttctggccttcatggaagatctccggcacaagcaggtcaaaaacatacagagtttccccttcaaatgaaattctgtatccaagcatcttataccggcattcggtatcccagcccatttccttatacaccagttctgaaaaaggcttgcaggtcatcttccggcttttacgtttatccggcttggcgatgcaccagcgcagggcatccttgtcattttcatcacagccgcgtacaacaatacgcttcaaatcactgttgaacatgacgtgtacataaaccacatcttccagcccagtgatgcaggccatgttaaatgtgatgctgtccttgcggatcacgatcgcggggtcacgaagatgtgcaaacagctccttccgcacgacctggtatccgtcataggaaaatgtactttctaattcttccgctcttgcgtctctatcattttctgcctgctcttctggcggcatggcgttcgtattttcattcatctgtgtcagtccatccttccattattttttccgcttcatggagcagagcgttcagaccatctgcggtaaaagtattcatttcttctatctctgctgccggccggagtacatcccagtttccagagtaattttcctgctgtaaaatcccgacctgtgcaatactcgtaatcggctgtccaaaagttcctgcccattctggtgggaaaatgtagattgtctgcttgactgtcttgccttccgattcttcttccttcggtggcagaacaatctcctcaatttttaccatctccggttcatccaattcaaaaagcatcagcttattatctctctgctccacaaactgaccccggaaacggtatttcaatccttcttcccattccatgatgtcaaaaagggtctttgccaaaccacggcatccaagtgtactggcacaccaccgaccttccttcagctttccccagtgaatcgcattcggattgctcttttcacacggccggattgcaacacagcgatcaaccgagttcagaagcagttccacatactccacatcttcaaattttttcaggcaggcagtattgaaacgcaacttgccattggagatcgtcatggccggattccgcaacgttgagaaatactgcgcccgtactacttcatagccagaaagatccaggcgattcataacctctgtggtatcggccggcttctcttgcatcacactttcagatgcctcccgatattcctccgctgaaaagccagtccagtccttgtcgaaaggaacatatcctcgtaggattccatcattcacgacactcaaaactggcaaaggacgatttttctttgcataacttctggatgcccgcagatgatttgctgcattatagacttctctggacacgattgcctcgtgatgattcctttgccggtattgcgtccgatcattattatttttctttgatttatgtgttagaaaatttggcgtgaaagtctttctcgccagcacatctccacaatggcgttcattggcaatgacacctgcaagagtgcctgggttccactctgtgttccccaattttgtcttccgaccatattctgtcaaaagctctgcaatctcagtaaatgaaaatccattcaggtacagatagtaaacgacctttaccgtctgagcctccgctggattcactacaagattgccgtcctcatcctgatcatatccaagcagagcaggcgtcaggaacagtccgcggctgaaccggcggtcaatggaccagttcataatgattgacttggaatgagattcttcttcggcaactgatgccaaaatcgtcaggatcatacgaccgttactgtcaagcgtataaatattatccgcttcaaatttcacacctacaggtggatcaagatctttcagtgtttcaatgacagaaaggcagtccacaatgtttcgggcaaaacgggcgatggacttcgtaaggaccaggtctatctttcctgctttgcaatcttcaatcaactgctgcattcccttacgatgctccagcgatgttccactgatgccttcatcatcgtaaattccaacgaactcccatcccggctgtgcctttatgtactctgtataataatttttctgaagttcataagaagaagtctgctcatcattatcagtagaaacacggacataagcggcgacacgccgaatagaggtgctttctccaagcccctccactgcttttgccgggataacctctaattcagaggtatccacacctttgtatctgtctcttatcctttgcttgcggtctaccgcttctgcttcacttcttatcatgtacttcctctcattcttccggctttatgctccaataccactgacgcatcttccgataacttcggatgccgagttctttctttgtattttctgctgtcctgcggctgattccttcatcgctcatccgtatataaatttctctggacctcatgtctccttcagatagcagcttttttatcagatatgctgctttttcagtcttcgattcaaaatttggtgattccggctccgctgttgggtctggtgcaatctcacactccagccaacgaaatccgtcttctgcagttattgaaaaacgaatctctccatcggatggagccagactgttttttatctgccgcacgatacgaatgtcagcgtctttaggatctcgttccacctgaaggacacttcgtgccgctgccacaacatcgatactgccaagactccggtaaagtccctttgttccctcttttttattgaggtggccgatcagcacaatggcacagtcatatacagatgcccacatgcccagacgctgcatcagctttctggctcttccggcaatctgaagatcagaatcgcttccgagatacgcctgtatcgggtcgattactaccagccgcggccgaaattctatgatagcctgccggatacgttcatcatccagtgtcagaccactgtatgtttcttcattaataaatgcaacatttctgcaatcagctccgcatttttccagtcggggctttatggtatctgaaacaccatcttcggaacactgataaatgaccctctgcggcattccgatgatttttccatctggcagagttccgcccttggacagttctgctatcagattcatcatcattgtggacttgccgtcaccggggtcgccttgcagcaatgtgatttttccaactgcaatgaacggataccacaaccagcggacggcagtcgcctgtacatcactatataatgtaagaattcctgtttctcctttgttcgccatcatcgttcctttctgtatgcagtctttccctcatttacattataagggttgcatgatgatttgacctccacttaacaggtggagtgaacttaaaaattccacctagcaggtggaaaaaggggctaagaccacactactgataggagtgaaggactttgcggtcttagctgtagatcggttgctatgtgcattttcatgcgggataatcgtattgccttatgcgggattcataaggaggaacacatggcaattgactatatcgcacttggacagcgtatcgctgatttcaggagcaagaaaaatttatcacaggaagaacttgctttcagctgcggagttggaaacaagcacattagcaacatagaactcggaaagagcaaaccaagtttggaatcactcattcagattgcaaactttctgaatgcctcagcagatgatcttcttgtagacagtttggcgcactccgcgtccactgccgattccgagatccaccgtctgcttttagactgtaatgcaattgagcaggagattctcacccggatggtaaaggagatgaaagcaattttatacggcttaggagtttgattttataacttgttgatcatataacaaaaaagcccgcataagccacaactgcactttggaacacaccgaagtgctgtctgtggtttatgcgggtaaggacaaaaaagaagcccaccagcggaccatgtaggaatctacacagtgcgccagtgggctggtatgttttatactgcttctgctggaatttggttcatcttctctttaaattcttccacagtcatgttcaagtcctcagcagcttcttcaagggtaatcttgccctttttataatactttactgtcgttctaaggtcgccaatgtcgatgccctcaagaatactctcatttcttaaatcttccatctgcttgcacacttcgctcactcctttcgggttttctttaagatacctggtcttctctgccattaacggaaaaatcatatcattagcctgcgtacagttaaaatcatgcatcaattttccaacatcagaatccccacgatactcgccattcacatatatgatatgcgttccatcattaaatggctttccagttgtggtaattatattctgtataggatataatggctggttttctccaaaataatcgttttctgttataaagatcacataagtatctggcagactgctgaaatcctctcctgcatcaagattttcaatatccatcatgctggaatgatatctggcacggtgtggatctgctccgatatccgctctttgaacttcaatgtcgtacttttttcccattgaatctgtaccataagcgtccaaaagaatagattttgcacctgtcacgcgttttaaatcagcctgagtttcacaagaaaccagctgtaaatcggtcttccctgttataatgcgcagcaccatttccgctaatggcacgttgtttctaaaaaggcaacgcatgaaagtatcatcaatcggtctaaaacctcgtaaacgttgaaggtcttcttgatgatgccttttctttcgttcctccagtgtttcggccatcggtgccacctcctcaaagtgttatcaatcggagtatacaatacccctattgtattttcatgttaccataaagccatccgtttatcaagcggtcttctgtgaactttccagtaattttcaccggcttttcaggcaccgataagcatcctcgataaaacttatgaactcctcgctggcacactcgatcaggcattttccatccacggctttcaacttttccataaccatttcagacagtgcattcccacgccctctcatcttctgagtagcaaacgccacggactcatcgatgaacgcagcgtactttgcaccatcaatattgctttgtaccggcacgccttcgccactgtcaagccggatcacttttggctcatacacagccctcacctttctcagtgcctctgccggctccatgctctggagatataatttcatagcaccggccgccacaatctcatcagctgttgcaccatatttctctgccagcatcccaactacatctttcattccaaacactcctcgctatgtgtattttctgtcgtatgtgtatttctcgccacccacaacatataacaggattctgcacatagcaatccttacgggtaaaaaaggccagacaaaaaaaggcaaaatagcagcacaataaaacattaaacaaaaaaagccctgccagatgcagccacaaaagccacacccggcagggtcctgtctccttccatcacaccgcttcttccctctcgcgcttcgctgcagttgtcaggtatctgcggtactgaatgctgaatccgtacaccttataaggagcatccacatagaccacattgccgtccatgtcactccgcttataacccatgaagctgtcgagcgttctgcggttgccttttgaggtcagtgtcacaccgaagtttgtcttataggttgccacatccccctgcagtaccccgctctcaacaaaagcacagtagatgcctttttcaaagtggagcatatctggtgcttctgcgatccgctcaggagtcagcttgagctttccgctggtgatggcacgtttccggccttcgatggcatttccgtccacatcccgaagcagggttccctgtacatccagaccgttgactctcagcggcattccgcctgcattggtatccggcagttctttcaggcaggcaaggaagtattcaaagttctttttcatgatcgccagcacaccctgttcctcctcgatcgtctgccgttcctgttggagtgttttcagccgttcctgcaggtcgttcacaagctctgtataaatctgggcttccgaaccttcctccgtttccgttccatagaaactcactccgatgcttcccggtgtcagtccgctccggatgtccaggtcgatatcgtcaatggtcacctccccgttggaaagggcttcattcagttccacgttctgttccagtgcagcttcccgaagcgccgccacctgatggctgatggcatcctgcaggcgttcttccatctccttgatctgattttccaccgttgccatcctctgcacagagatgctgttgttattcgccagccggacagcctgctcataggcattgtcaaacatcgtcacgatcatggaagcatcttcgtgctgttcaaagtcacgcttcatgctgtagagcagttccatgaaactctgctccagcgcacactcatggtagcgttctgaggggcagcgcttatttgccgcttccttttcctcatccgacatgcagcctttcttactccggcaatacgctttctggtcgggagaaccggtcttcggcggctcaccgtcccgctccccgaccttacgcttgcaccgccaaacgggatacgagtaagtgtatttttccagatactctccggtatcctcaccagtcgccttaagactccgctcatcgctgtaaccatttgccacacccgtgtaggttgtacggaagaatccctccccgcagggctttccggcatccggcccattctccaggatcgcaccgcagcgcaggtttccaaacggagaacccttaatactctttacctttttcttgccggggcctttcgtcatatctgccctcggcttctcgaacagcatggtctgcactttgtcccaagtcacacggtcgatgatgcccacatgatggttcttcacatagtaccggggtgcttcgcccttgttgatgctggaacggtgggtaaggaagtccttcgtgatggtcttctgcatctcaatgtcgcccacatacttctcattccgcaggacgatcaggatcgagctggcactccacttcttcccgttgaccgtgaatttttccatctggttcagctcctgtgcgatcttattcgccgtctggcctttcacgaagcggtcaaaaatgtaccggatgatctctgcctgctccggcacgatgacccactgcttatttgccccaagctcataccccagcatccgtttcagattgatatgcgggacaccagactggaacttcttctgaatgctccagcggatgttatcggaaatggaacggctctcatcctgtgccagtgcagaaaggatcgtcaggatcagctcacctttggcatccagcgtgtcgatattctctttctcgaaatagatacccactggcggcttcagctgccgaagctcacgggtacaggtcagggagtcaatggtgtttcgtgcgaatcgggaaatggactttgtaacgatgtagtccagctttccattcatcgcatcttttatcatgcggttgaattcctctcgatgctcccggttggtgccagattttgcttcatctgcgtagatgccggcaaagatccagccgggcttccgggtgatgaggtctttgtagaatgctttctgtgtcgtgtaggaagtctgctggctctcatcgccggtggaaacacggcagtaagccgccacacggatgttggtttggcttttcagctgcccgccgttctgtaccgagcgcacactggcggggatcacatccactttttgtcttgtcataatctgctcctttcttccagccttgcaactggtcttatcttacatgcctcttccgctggctgccgtcgcgcatcgtatgcccgtcataatagcttgcggtattgcggtaatcttcaatattggaatccatctctacctcggtcttggtgtcatcgaaccagtggaccgtaaacttcaacggtgaatggatcgtgatagagaggaggaatgccttgcagtgttcttcggtcacttcattcagaaaggccaccgtaccatcccgccccgccgggaggttcttcatccacctgattgccttttcccttcgttcataatcgccctccagttcttcccagtagtcttccatatagtcgagctgttcggtcagtttctgctcagtgtccgtgtccttctgaatatcacactccagtttctcaatgagctttttcttctcctcaatagaagcagggtcgatcatctcgtcaccgagaagttccagacgggtctgcatcacatccacctgacttttcaggagccggatcttcttactggtgctttccacactggtgtgtgcggccgctatctgctttttataaaaagcacggtcgcgttccataaaatccagcttctgaatgctctccagccgtgcaagcatctggcttacaaaagaatctgcttccggggtgaagttgtcatactgctctttgaaccggccgctcatgatgtctgccacagccacgttgtcatggatgggcttaagcgtcagccggaaccgctccagaactgctttacggaaggctcggacaacctgttcctcgtatactttttctgcatggcagatacgttttcctgtcgtccggctgctcgtcgggcaccgccagatgggatagttcccatttccgtttgttacatggaaaaagcggccgcactccccgcagattagtctttgggaaaacgctctcggcttcttgccggatcttgtcctgttatataaatcgctgtttacttttacaacttcctgtgccttttcaaacaggtcctcgtcaacgattgccggatgatggttccggacaaaatactgaggaacttcgcctttgttgtcccggacttcatgtgtcaggtaatccgatgtgaacttcttctggataaggactgcacccatgtaccgctcggcacggacgatccgcgtgatattcccgcctgtccatccatccagcagatcactgtttaactgccctttcttggattttttctttcttactctcactgcgtcggtgacaggagccggaatcttgtccatgttcagtccccttgcaatctccgtataggctttcccttccacaacttcatggaaaatgcgccggacgaccctggcttcttcctcaacgatctcaatatctttatactcatatccgctctcggaggtaaccatcttcccattgtagcggtatccgtacatgatcttgtttggaacatcccccttcggaaagcgcatcttctgccccagccggatgttactggaaatgctgcggctttcttcctgtgcaatggctgccagtgtcgtaaggatgaagttgctggtcgggtctgccgtatccagattttctttctcgaacagaatcgttaccccgcagtcatgcaggacatccagtgcactcataaagtcagccgtgtttcgggcaaatcgtgatatggacttgcacacaatgcggtcgatcttcccgtccttacaatgacgcatcagtcggcggaatccggttctcttttccttggaagtgccggagatgccgtaatcggagtacacaccgactgcattccatgccggattattttcaatcagctggttaaagtatttttcctgcgtttcataggagttctcctggtcgctcatgtccgtagaaacgcggatgtaagctgccacattaagggttccggctttctttttggtagcccggaaggtcgccgtcgaaacgaacttgttatcctgcggttcttccggtgtgaagagcttcgtaaactcactctccatactgctctgcagccgttctgcaatgtccggctctgccatgacctttttggcatccagagctttctggataagagctgtgataccggcgtccacgatgtcttttgatttttggggtgtctgttttttatctgatgcgtttttgggtttttgttgagtagacctgccctggtgcgtatcagccagtggtaaaaaagaagctgtggcagcatccgtactttgacgaacatctgccacagcttccacaggtttctttttcccaagagcggcttccagtaaagccgagacatccgcagcagatgcatttaccctcttctgctgtttctgctgtactgtattcttcacagtctttttctgcagatttgcaaggaaatccgtaccagtactcatagttttcgctcctttcctgcccgttttcttctctttgggcagtcacatattccctctgtttcgtgatattatcaagtaatttcggcgcagaaagacggagaataatccgggagattattgtcttatctgcacgatatgtacgccccgcccggtaaggacggggagtgtttttagatacgggccgcaaagtcaagtgcgatccaccctgcaccggatttcagcttgccccagcccttcgcagaaccagcaccggcagattctgccacgatagtaaacacgcctttcccggtgtaataaccggtcttaccgtaattcgtgcccggtcccttgcggatgttgaggtctttaatggatacacgcacagtatacgggactgaagacttcggttccgggtagacggccttacccgctgggtcaaaaacataatagcccggattcttatctgcacactgttttgcataggtgaggtcgtggaacgcacctttctgggaagcggcattctgccagctcttacggacacggtaccagccgggaatggtggtactgccagagtccgcattgtactgcgtcaggttccaacgctcgatgatattgcagagatcctgcacataggcgtggctggtagcataaccaccatccttgatgatttgtgcggccttcttgtaatcggtacagccagccagactctcatagcgtttcttgctgccattcatcgcaccgagcagatacgccgcatggtcggcaatagagtcctcgacacaagtgtacttacggaaatcagcattgaacatcacatagcttccttctgcattctgttcctgcgttttcttggtgtagacggacttgccatcccacacagagttcggccagctgttcccggaaaggctggtcttcataccaaagcagttgttcgcctttcgtgccagttcggaagaaccgtagctggattccagaatgaactgcgccatcgacacacaggcgaggatgccagtggttttctggtttgcagtaaacagcggaccgattttggctaccgtctccgctctagtaagattttccaagtcagccgcctgcaagccgggagaatcattcagggcagctgtaaccttttcggccagatccccaagacgagcatacagccagtcgccggggcagcttttatttgcataccagcgatggaccgccagtaccatctcatccgacgcaggtgcgtaattgagagttttattcttgtcgccaagccataaaagtttccgcttgccattgcgctggcaaatgtcagtgcagagtttgatgagcgaggcatacacggcactgttcatggcatacggctcgctcttatcgcttgcacactcaatcgtgatggcgcgctggtcattggcattgctggacgaacaccagctgcggtttttctcttctacgcaaagagagattttcccgtctttgccaataccatagttacagcttgcctgacggctcgtgcttgcaaagcatccgcagatactttccgcagaaagctgaccgaccacacaatgcggagtgatacggtcaatgctgtgggtgcgctgcccggaatgattcggactgagtttggtgtaggacaccagagggctattggaataagccatttcacacactcctttataataaggaaaggcccggaccactccgagcctttatgggttgattacttctttgtgtttagggaatcagcaatttcataccgacacggatggcattggaagtcagaccgttcagggtacggatatccgcacagcgacttccatctcccagttcctccttggcaatcttccagaggttgtcaccgggctggacggtataggtcttgctggccgtgaatgcgtaggtgtctgcactgttcaggacatatgccacgccatcttctgcttccgcacacttgatcttcagccagccatcacagaactggatgatctctacaagggtgtttttcttatagaccgtcacgatctccgcactggtatccggctttttgcggatgttcatgagggtcttgagcttgccataggcaatggtagccggaagttcttctgcggtcggaaactcggtctcgtccacatcagcctcggctttctcctctgccaaatcatccgtcttcggctgttcctctacatcaggttctttctcttcctgctcgtccagaaccggctgttcctcgctctcctctgctccggtgacaggcacagcctcctccgggtagatcacattgccgtcgttgtcgaacacacggctgccgggattctcatcacacttggcttttgcgttcgccaacagacggtacgcgcccagctgagatgcttcatcctcccagtccatgcgcacgcgatagtaaccggtcgtcagttttgcaggataattgttcttactcatagcacttgcctccataaaatgtgggaggggccgttacacccctcccggttgctcactgtttcttctcttcgctggttttaccgttcagtttagccgcatgattctcatccacaagctgaatgagcatggctttcaacttctccggcacagggagtccgatcacagcacagttctccagaatagaaaggccctcgttagagattgcccagaaaatcagagcagttcggagtgctgcgccctcgccgatgatctgcgtatcgatcacactggagataccaacaaggatgaagatgcataccttcttggcgatacccttaaacccgacctcagaagacagctcatgtcgcacggccgctgcaagcaccccagtgaaataatcacaggtcacaaaaacaaccagcgcataaaagaagccgtcaaaaccgccgaagaaccagcccaagaatgcacccatacctgcaaacatcagctctaacttatcgatcacattctgcataattctttcctttccgccctcttgagggcataaaaattgggcggcattgctgccaccctgtgtaactgtctgtctatactaaacaccgtggagcaggagcaaggaacacctctgccctttcggtgggaatttacgaggagctatcttccgtcagccacgcgcggatctgacagtagtaaccatctgcccatgcctgatagcctcttgcggagggatggatgctgttcgtcagcgtccggctcgtttccgtgaagcggttcgttacaggcttgtccgaatacgggaatgccagacggcggtcagtacgcagaccgtgcgcaaagcaggtcacattcttatggtacttgccagcatcaaatgctttgatgagtgcgagattgagcgtgttgatgctcatatggaagatgcccatgcttgcaccgcactgataagaataatccgaaccgggaccacaaagaccgataccgatcttgcaattcgggaagcccgtttccttatccagcagcgcatcgatgaactgctttgcctgatccacgaacttctgtaccgctgcttccgtgcggtatagtgtagtgccctgcgatacatcattggtaccaagtgcgatcaggaagtagtcgatgccctcatagccgttggtctcgcaatatttctggaagtccaaacggcctttgatcttgtcccagaacgcattcgttttgccagcgtaatccgtgtctgccagataccgggcaaatgtccagctgccgcgtccttcgtgtttaccgccttccggtcctctcgttcccagcggatggatcacgcagtcattatcctctgccagcagacggtacacttccgttgccacagaaccattgtccacgagagaatctccacagatgcagatatttttcgtgagcttatccttcagcttatggtggaccctgacctgcacaggtttggacgataccgtatggcagtcttcttcatccaaacggcggacggtcagtgcaaaatccgtactgtccttcgtcggcgtgtaattcatgcaatactcgttccgggtcaagctcggtgcattcgtgcctctggcgagcacatacagattttccttgccatcatgccgggaaagacagtcaaagaagatggaaagctggcgcccttccatgcagtcccagtgggacggggtcacgatgtcatcttctacagccggagtaatagctctctgcacataatccgtgatacgcttcgggataaaagacgcctcgttatctgcgaacagattgcccgctttgtattccttaccgcccacaatgaacttcacatccgggtgaatgtgcggattatatagcttgctctgataccagcttgcaatatagaaaccattcgttcccagcttgcggaacaggctggtgtcgtacagattgatggttctcgtgccagcgtcataagcaagaatgcgcatcggcatgccaaatgtcgagctgggtgtgttaaacgccatctctaccggatcacctgccgtgatccactcatagtgaaacgcatccggaacacccagacacttggtactgacctggatcgtaccggcattctggtcaatggtaataccgccgcttgccagatacatgtgacggaaatccttaccggcgagatccgtgcggagctgctggaagcggtcctcatacttcttttcgatataggaatcacgccgttcctcatcgaacagctcaccagccttataagtcgtgccatccagtacaatgctgaaagaggaacccatgtgcggataccagaaatgcttttcataccaggcagcgatatagtagccgtttactcccaatgcatggtactgcgcagtgttgtaaagattgatctggtccttggatgagtcataggcaaggatcagcatatgattcttttccgcttccgtactatccaacatcggcaccggctcctcgctagcactgatccagtagtaagcaccgttatcaaccaccgccaggatacgttttgtgacctgaatggtgcggttgaccgtatcgatcgcaaactggcccgtggacaggaacatctttgctgaacggtacttgtgctgggtcatcgcagtattcgcaattttggctggattgccataatcgatcccgttgatgactgtaccgctactcgaaggagctgcatacaccacattccagtcaaaaaagaccgcaaaaacaaagcgcccccttgtgaatagatcgccccagctatcgccgctcgtattttccaccttaatgaccggaacctctgtcttttctcccgtctcgtctgcggatacttccgcaccatcatagtagatcgcccaccattttcccaccaccgcaaagtcagccgaaatactgttttccgccaccagtttcgtctgctcgtactgtgtaccatttgtacggcggcagacatatacactctttccctccgggaatgtgaccgtcaccttgctgccagtgagcctgatgtccacgctgccgttcatccactgccagcctgttgcgtaatttgacagcaatctcatcgggagcatgttgtcatagaggtacaccgagagcttcgagaacagcttttcattggtggtgacagagatgaaacgggtattcggaagcagtgtgatcacatagttgtcatagaccttgccgctctctgcccggaaacagccaccgaggaacttacggtccatgtcatagcagaccacgttgttatagtcattccggccgctcatatagccgaactgaccgtccaccagaatcgcatcaccgctgaccgggaccatgtgcgccacgcgccagctttccgaagctacaaggttgccgttctggtttgcgtaaccatttttgatcacccagttcttcatgatattctgcatggaacgcaccctgccgaccgcacggatattgtcaccggctgtgggataagtctttccctcatcatccacacgggcatctacaagctcctgtgcatagttggcatttttatctgtagatgccttgacgttggcattgatctgggctttcagcgtttctgcagtcttatccatctcggacttactggccgcaaccgcactgtttgcggcatcgaccttctgggtgatatccgctacatcctgtgcggtcatcttgcgcaaggctgccacatctgatgcagtatctgtacgaagctgctctacatctgccgcagtatccttgcggaactgctccacttcttctgccgtattctgacggtacagagccatctgctccgagaaccgggaacacatcgcccagtattcctcctgtgacagaagcgttccggccggcacaggtttccggctcatatagctgtcgcctgtggattcctcatacacaatggtaagaggttcatattcttttgctttgtcccagcgtaggtataagtggcgatcttgccgttgttgatagctgcccgctccaccttcaatgtgagggagaacgaaccaaggacatcacccgctgtgctgagcataacaacatccagcggaaaccgcccggcctgtgcggtcatgaaggtcgtgattgtaaagacgaccgccccattttcaacaaacacaaggtcggatgctgtttcgctggtgtagtgaaagatcgtaccgtccggtctggtaccggaacaggcaacgatgcagtcctgtggcacggaatactgcaccgagttgttatataggacacatctgactttccgtgccctgttatcatactgtttgaccgggactgtcaccgggatcagattctccgtcagcgacagctccacttcctgataaatgcttgtgatcattacgcgctccctccttcctgatcggtcttcttatcctctgtttcttctttgttttccgtatccttatcttcaccgtccggcttttcgatatctggtgtttccggctcggtcggtgtggtcggttccgttggctgttccggctcatagccgatggtctgccactgttctccatcccagagctttaactgcaggttcttcttatcgacccagagcgtatctgctaccggggcttccggtgcggtttccgataccgggacactcggctggtacttttcatccagttctttttcgacctcttccgacagcttcttcgccacactgtatctctcgtccaactccttttgcagatcttccgagatttccgtaagagtgccataccgcttatccagttcctcatataaatccttggacagcttttttgctgtttcgtaccgctgatcgagcgttttctgaagctcggcagaaatggcggtcgctgttttgtaccgctcatccagttccttcagcagctcctcggaaagctccgtggctttcttatagcggtcatccagttctttgagggtctgttccagcaggatcgctgtcctgactgccgtgtcatccgactcccagccatagctccacgtcttaccgccatccgtggatacaaacagtccggcagagctgttcttccatgcgaccgtggactgtttcaaagtcgccgcattgaatgcataccgggtcgtatttcccttattgtcagtttcatttttataatgaaggccaaacagcgcagcaaaaagcgcaccgtcataaatgatagatgctgtgatcccaccgacctgctctcccactgctgtctccgcacggactgccgtatcgtaggcaatcgtcgctgtattccggatgctgttgagcgaacctgtcagagaagaatttcggctgctgaccgtggagtttgacagcgtgatgctgttatagcgttccagtagcgcatcatactcggtttcggtgactttggaactgacttcaattcccagctttgagataaacacatggaccgtatcgcaaagggaaacacgctctgcttccacgatgtcctcataccccggtgtattccagagctgtaaaaagtcgatcttgatatcgatctccggctctgttaagtccgtggtgtcgatatagttctgtgcgtattcccggagtgccgtctcactcggcttttcctgaaaattgctggtacagtccagcacggtgaccttctggtaaggaatcgaccgtttgctttgcagcaccaccttctccggcagttccatgaccgcctgggtttcattatccacccagtacggatgcacacccgtgatggtgttctcgatggatttctccatcttgaagtctgtcaggttcttcccgtagatgatgtggacattgtgatccgcacctctggttttatgaaacttgaccgtgtaccgatcccactcgaattcaccgccaaaaacatccagaactgacccggccatacctccaaggcaatttcggaaggaggatggaattccaagcgtaaaggtggcactggagtccacatccgtccagacatcgaaagggcagtcagaagcagcgtggcttttcagcccctgcattgctcccgcacacccagtcactgagaacggggaaactgtgatgaagttcagctggtaggaaatgtgccgagcctgaacttccagctttccatctatcggggtcgtgatcttgtagatgcggaacggctgagactgcatggtatcggatggcttggcaaggatgatattcccctcctccagcatctctgcatggatgccatctgccggacagaccagcttcagttcatagcttccgtttctcttttccgttacggtacaagactgtgcatctgccagctttccaataccgttatgattgaacttcatctctgttgatgaatataaacatgggatcactggctgcacctccctcttacagcgtccaccagcgtggagtcacctccaccgccgtgatgccgcctgtccatgcgatttgtgtctttccctccggcagttccgggaaatcatccgaaaggatggtctcattgcagaatccggaggcattataggcattgtgcgtctcgcagttgagcagcacgtaatccttgatgctgtggatggtgatcttctcctcacccacatacagctcaccacccgaatctccgtagaccttaaagatgggctgtgccggaaaagcaaagggattctttaaagtcgaccttccatccagccggatcaccctctgcccatccacgctccacctctggggcttacaattgaaggtaagttccatctcagcggctttctgggctgtcacatcgaaggcaagggcatccttacagactgccatccgaaaaaaatccggatcgtaggtatcctgcaatttctgatacccgatcggagataacagccacgccttgaccgctgctgtcttggctggcagaccattgaagaaaaatgccttatatttgatatccacgttctgatatctgcgcctgcctgttcttgcattctcggtgatgatgtccccgttcctgccgggtacggaggtgctctccacatccgcagccggggaatcatacacaccgggaccagacaaatataaaaggaagtctttgctggacttccctgcaaaggacagatactgtctggcgtatctgccttttaactgaaactgtgatactgtctgctttggggtgttatagcccatacgcatctcctcctttatttgaagaccgaatcatcctcgtggatcatgccgttgatcttatcggcaacggtctgtgcgagttcatcatcgttccggacgttatagccattgaccgtgatatacacaccaccaaggttggtcgtccgggtggtaccgcctccggccagagctgcctgcgggaagttccagccagagccatcgaagtgcggcagggtcagttccggcaggctgaaggaactgatgccctccattccctgctgtacctttgctgccatcgacctgatctggctgatcagtccgccctcgcctttcttgatgccaccggaaagcagtttcataaagtcgggcatataggtgtccgcatctgccagaggtccttcatccggcacagagaagtgcaggaacgaacggataccgcttgccacactcttgaccgcattgccgacccagctcacacccttcttgatgcctcctgcaatgccgccaacgatgtccttgccccagctgactgccgaggaagccacgttcttgataccgccccagatggacgatgccacgttgccaatagcagatgccgcattggagattccgttcttgatggcgtttattccattcgagaataccgaagtgaccttgttccagatatttgtgacaccttcccggaagccatcgcagtttttccagagagcggtcagtccaagaccgatgccgccaacggctgccactgcgatacctgcaggacccgccaaaccagcaagtgccgtgcctgcggatgcgaggaaaccacctgcggagcttgctacccctgcaagggctgtacctgcaccagcagccaggccggatacggtcgtacccacagaaccgagcagaccggaaagcgttgtgccgactgtcccggcaataccgcccagcgaagaaccgatagacgatacgatgccggaaagactaccgcctaagccgccgatcttcgataccacaccagagagcagtccgcccagattcgacaggattcccccaccgctggagccaaggcttcccagcttcgagatgatgccggagattccctctcccagaccgcccattttggaggtcagtccggagatcagattgccaaagttcgacacgatctgaccgccatctgcactgccgatttttgacaggaaactgccgatgttggataacagaccaccgccgttctctgtaccgaggacattgccgaggttctgcatggtatcaccaatgtttccgatggtgctcttcatggaaccgagcttgtccacaagccccgtgaccgtattgaccgtatcgccgactttgctgataccattgcccagactctttaagaaatccgagttgaaagtatcgccaaggcttcggatcgaatttccaagggaactggtctgagaactcagctcgccaatggaagatttcatgtccgcaaaaccctgctttacttcatcactcatgccgccgactgcggttttggtgatgccctgcaagtctgtccagagctgttgaaactgtgttttcacaccggaaaggccagacatcaactgagtctggatactactgccaacgctccgtgcagccgaaccgattccgctctggtttctgctgattgttgcagcaaagcccccgaccaccgaatccatccagtctcccagagaattcacaggggtcgtaaggttattgctcattgacccagccagacctttcacggctttaactacaacttttacatttttcttgataccacttgccagcagcttcataaagtctggcatatactcatcggcatcggacagcggaccttcatctggcactgagaagtgcatgacggaacgaatcttatccgcaacaccattgatggcacttgtcacctctccgatcttcaactgaatgccagaaacgatattcccgataatatccgcaccccaagagaaagcctgacttgccagccccttgatatacgcaactgcgctgttgaaccctgcttcaattgcggaacgaatgtttccgaccgtacttatgatgccactatgcatagcagtgaaagcactgattgccgcatcccttgcgctgttgctgaaagaagtaaccgcagtctttgccgcattccacccagcagaaattgtggactggatcgtagcggtaacggacgaaatcgtactgctgatgccggtccagatggaagaaacagtggactggattgcagaaaggaccgtcgagatgactgtcttgatcgcattccataccgtgctcatctgggtctggatgccaatcagcagcggagataggaacgatacaatggcgttccacaccgtagtcactgcggtctggatcgcagtcaacgcggtggagatcgcggtctggatggctgtccaaatcgtagagaaagttgtctgcaatccggtcaaaatcggcgttataaatgcaacgatggcgttccagatggaagtgattttcgtctggattgcggtcaatgccgcaccgatcaggatttgtattgcctgccagatggtctcaaacaaatatttgaacgcatccaacagaggtttcatggtgttatagatgccattccacaccgaagtgatggtcgtgctgatggtattcatgaccgtagtgatcgcggtcgagatcgccgtccacacagttgtcaccgtggtatggatcgtattcagcacggaagaaactgctgtagaaatggcagtccagatggtgctgaaggtcgtctggatactcgtaaggacagtcgtaaagaaactcgaaactgctgtaaatactgtcgttgccacactctggatagcggaaactgtgtttgaaaagaagctgctgattccgctccacacggtctcgaagaagctcttgatactgccccagaccgtctgccagtctgtcccaaacagaccgaggaacacatccagtgcgctctttagtgcggtaagcgtcgtggagaatacagacttcacaccttcccagatgctggcgaagatttcctttaccgcttcccatgcaccgctccaattgccggagaacacattggaaaagacatcgaacagaccgagcagcgtatccagaaccgtactcaataccgtagccataatctggaatgctccctcgaacagcggtgcaagcacctgacagaagccatcccagacggctttcagtacctcagtgacatccttaaaatcaaagcccagcccgttgatccgctgcgtcaactggtcgcagaaggctttcactttggatacgatatcgttccagatgccagtgattgctgtacggaattcctcgtttgtattccacaaatcgagaaatgctgctaccagtgtaccgatgaccgcgaccaccgccacaaccggcccggataggccgcccagcactgcgcccagtttgccgaatgcaccgctggcaccacccacgtgggtaatgagcagccggacaccctttgcgagagaactgaatccccgcatcgctgtgccgaccgttgatatggtcttacccagaacaatgagcagcggaccaatcgcagctgccagcagcgcgactcggataatcacctctctggtgctgtcgtccatgctgttcagcttatcaacaaactgctgcaccgccgatacgattttgcgaatggtcggcatcaggatatcggcaaaagaaatggccagctcctccaactgagatttcagaatggtgagctgaccacttaaattgtcctgcatggtttctgccatgcgttcggatgcgccatcgcatccctcgattgcaccacggagtttattgatatccccctcgccggcattcatcagagcgaggaagccgggcattgcattcttgccgaccagagcttccgcattggctgccttttcggattcagacaatcctgcaaaagccacacggcagtctgcaagaatgtcattcaggcttctcatactgccgtctgcattgctggtagcaatcgtgacctcaccgatgttcttgccggcaaaggtcacatcaccggcaaggttgttcataatggaacgcagagaagtaccagcctgcgaagccttgataccgctgtttgccatgaggccgatggcttctgcggtatcctctgccgagaatcccaacgcgccggcgataggcgcacagtacttgaacgtctcgcccatcatgctgacgttggtgttcgcgttggaagaagctgccgcaaggatatccgcaaaatgaccggaatctgaagccgacaggccgaaagcggtaagggcgtccgtgacgatatccgaggtcgtggcgaggtcttcaccggaagcggccgcgaggttcataatgccctcaataccagaaagcatatcttcggtgcgccaaccggccatcgccatatactccatcgcggaggcggcttctgttgcggagaatttggtctttgcgcccatctcacgggctttcgcacggagtttgtcaaagtcagccccggtcgcaccggaaatggcagagaccttgctcatctcggaatcgaaatctgctgcagtcttcactgcagcagtgccaagacccgttacagcggcagtcaccggcaggaacttcttaccgacattctccacagaagatccaatgttctggagcttttctccggcttcatcgattttggcaagagtcgcattggtagtagccgcctgatcctgtaaggatcgcagattctgttcggtctccacgatctcacgctgaagagcatcgtactgctgctgggtgatctcaccgttggcaagctgctcattggcctgctgtgcggcagtcttcagagttgccagtttttccttggtagcttcaatggcatccttcagcatcttctgcttctggacgaccagttctgtattggagggatccagtttcaggagtttgttgacatccttcagtccggactgcgtccccttgattgacttgtttacactttccagtgctttggagagctttgtggtatcgccgccgatctcaacggtgatgccctgaattctggatgccatatggatgaccacctccttgcgggcatgaaaaaagcccatctgcacggagcagacaggctaaaggaatgaaataatatactcgtaagttactaactcgtgagttacttttaataaagtaggcttgcggcttggaaatttacaaatctttcgttgctataagccgaaaaaagagctatacttaaattgagaaattgtactcaaaggaggtacgctctatgagtgaatataatattgacattgccgatatgcagtgctgggttttccgcatggcccagtccaagtggaaaatgtctcccagtgactgcgctgaactgtttaagaaatacgacattcttggatttatttctgaatgctatgacatccttcatctaaacggttacgcctgtgttcttcacgatgttgaaaccttgttaaagaatcgaggtgtatccgtatgatcgaattgcaggatggtatgcttctgtaccacggtagctacattggtatcccggcgattgacctgaatcgctgctttggtggactcgattttggccgaggtttttatcttacatcttcctacgagcaagcgtacaattacgttcagctttcggttaggaaagcgatgcgtattggtacagttccaaaagatttcaacctggaagacggacagatatctgtttacaaattccactacgatcccaacatattagcttactgtttccacggggcctcagttgaatggcttcattttgtagcagcaaaccgaaaaaaggatttgttcccacaacttttgaaaaaatacggcaccatcgacatcatcggtggaaaaattgcggatgaccaaacagcccataccttacagcagtatatcggtggcgtcgactttggtatccccggtacaccgaaagcagacaaaatagctattgaaaaacttcttcccaatcgcctaaaagaccaattctgttttcgcacgcaggacgccgttaatcatcttgaatatataaggagtgaccgctatggagatgtcaaactataacttcacagatacgcagaaagaaagctgtgctgtcagtctcatgcgcgatacggtcaaagaactcgctttgcgtgatactatttcctatgaagatgcactgttacgcttcacaaattcaaaagtatatgaaacacttttcgactatgataccggaatttggagagaaagccccgactatcttctgaatctctatgactattgcaattctaaaaagactgcctaagttttctttctgcttgactagcactactacatcggcaatacttttaacagtgatcaggtttcggtaaccttgcgaggtccgagaccgggaagatgaccttttggccaccttctttacccactcagctgtgcacggctgggtgggattttttataccttaccgccagacgattgtgcttatttcattcacgatataagcacggtcgtctgttttttgctttagaatcggtcgaaatcctcctgcgaggccagctctttgtacggatagtcgtcgttctgccgttccgtgaacatatcattgaccaacccgatggtcagcaggtcgaggtcggcgatgctgataccgagctgtacacagcgcagcagaaagagcggggtggtcatttcccgctcacttttgcgaggttttttctggattccacctcggtctgcacattcaggccccacagttcgatcagctggggcaggatctgataaatggagaaggtgttgaactggtccaggaactcctccgggctgtccggcacattggccgggtctgcatgacgggccatcagccatgccagatcctcgaacatctccagactgaacaggtcgaggttggaattgtcctcatcgttctcccccacgctcttttccagctgacgcaggtctttgtagatatcacggccgaacttgatgcggtacaggcgaggcacagcggcacttgccttaaaggtgacttccttgccatcgatctcgattttctttgtaactgccataatcgtaatcctccataaatttcatgtaaaattggcagagccgaagccctgccgtatatcgtgtttcttactctgccgggtcaatgctgaccagtgcattaccgccgctcacagtaggcagctttccatcccacttctgaaccttctggtaatcgatcagcgtatcagacaggctttctgccagtttgcggtttgcctctgcctgtgcgtctgcggcaatggaagtcttctgggcttccgcctctgcattggtgatcgccacctgcttatcggcttctgccttggcaatggcggcttcgttttcgatcttctgcttatctgcgttctgctgtgcaatggacttctgctggatggcttcgttataggcatcctcgaaattcatgtcgttgatgacgaccttgttcacaaacacaacatcatcgccgtatttctgcacgagggactctgccagcttctgctgtgccagaggctcgatcttggtacggttggttacctcattgggaccaagttctgccatcgcagacttgattgccgatgccacaagttcgtcaccgaccagattcttgatgtcggacacattcgcatacagccatgcactcttctcaggaagcacctgataggtcacgatgacatcagcagcatacaccggagtcttgtcagaggcttcgccccagacctgcgcctcgatgtgtttatcctgctgcttgttgttgaccttgtgaatgctctgcacaaagggaatgcaaaagttgagcttgccgctctggatggtggtctcctggatctggccaaagctcgtcttcacgcccgtgtatccggtggggatgatgtgaaacgaacagacagccagcaccagaacgatgatcactgcgaacaaaggaaaaatcttcttcataatcgtatacctctttataataatgtaagcagagccaaagccctgcggtgtgtgtcggtcacttagccctgcggctcctcggtatgactggtgtcttcggtgtccacagcttccgcctgcggctcatagaccgcatcgtaccacttgttgtagacatcatcggtggtgttggtgccggtcttggccttgacataaccgtttgccagaggggttgcctgcaggttcagggtgtctgtcttgacttccttgctgtcctcattggtctcaccctcgatggacggacggcttgccacacagttgtacagcacatgacgaatgtggcgctggtcgccatcgaactcgaacaggaaggcgaaatgttccagttccacattggcgttctcagcaagcacgccgttgctatccagttcctcgtgcatgatgtccgtgaggaagctctccgggatcagtgcgatttccagatcaccctcgtagccggagttgttattcacgacataataggcgatattgtccgcatagaacggctcgatctcaccgttagcatccatagaaagactgactgcaccggggatacggaccggctttgcataggtgacactgccatcttcgtcaaaggttgccttggcataatggcagtttttcaggccaaatttgaccttattgcttttcttcgacatagtgttcctcccataaaaatatcctgcatgagcatcacacagtcagctcatacaggacttcatacatcttttcggtttcgatccagacctcacttttctcatagtagagttcgtgtgcggtcaggacttcttcaatatttgcttccatatccgggtctttgtaatcggtgtagacctcaatgtccagccggttgaaatggtggtacacaagattatccgcgccaaagttctcagctttcggatacaggaagcagataaacggtggatcagggctctccccttctgcgaaatggtcatacgcataaggaagccccatctcctccaccagagcttttacttcttcgtgggtcattggttcctccttactttagtgccttttcgataagggactggagctgctcgatacctgcctgttcagccggagcgatatgcggtcttcctgccacacgaccgccgccgcgcttggcatgacctttttccagaagatgcgccagctggtagcggttcttggaatgcaccaccatctgaagactctgactggattcggactgcttggtcgctacccagcttcccttgtatgcgcccgtccgggacggtgcattggccgaaatctggtctttgaccgtcttggcggacttacgcacagcactcttcacctgagtggaagcaagcgttgcatactctttcagtccttcgttgatggcgtctgccatctcatcaatgctgacggtcctgctcatccggctgcctcctctccaatctgcaatgaatcttcaggaccttcttctgatagttcatcgggtcaacggattcgatattgtaaagctgctcccggaagcggatgcggaaaccggtggaagtcaggcctctcgtctcactgcaccagcgaaccgtaaacaccacgctcttctgttcggctgtgacctcaccctcttcttcctgcgtctgataggtcgaggcgtaggcaaagcaggtgaaatattcctcccatgtgttccgatggtttccgaccttatcggtcacgaccgtgcttttctcgatcgtgatccgctcattcagcttttcgatcatcagaacaccccctccctcacagcaaacagaatggaacgaagcgtcagcatcagctgcttatggtcagcttcgtcccggtgctcatagagataccccagcgcatacagaatcgccacacggcaggtgctgcgcagggcttccagtttccttgtaggctgtactccgttctcggcatcccggtcagcggcattgactgcctcccactggtcttccgataaacggcccacatccttgcacatctgctccgcagaagataaaaggatgccgatcagggcatcctcatcgctgctgtccacgcggagataggtcttcgcttcgtaaagcggaatcagtgccataaccggctcctcctttccagactttcttagccctgcggtgccatctgcagaagctgtacggcttcgggcagaatcagcttgccatccacacgctgggtggtcaggaaaccgacctgatcagtacgggcatacagctcgttcagacggcggaaggtgcggttctggcggtcagccacccagtagtagctgtaatcgccaaaggccatgaccttgctgccacccttgatctccggcatgaaggcggaagtcttcagcggacggttcagcagggtatccggcttgccgatctccagacccggcttccagatatagttgccgttgttgtccttgatggtcatcagctgcagcaccagggcttcgttgcagaggaactgtgccttcttgcggtacggagccttcagtgcatagtagagcttgaagatctcatcgaaggtaacggcatccttctgggcagcggtcacaccgaccttggcaccgccggtctcagccagcagacccagaggcttgcccacaccgtcgccggtgataaaggcgcgctcctctgcgttgcccatacgcacaccgaaacggcgggcaatataggtggcgaggtcaaaagcggagtcgttcagcagctcattggagatcttgatcatagtgcccagcttgtacgcagacagcatggtctggccgaaggtggtatcactctccgggatctcctcaccttcatcgatccagcttgcctcgccggtatcctctgcgatgggaatcttacgggtgccggagctggtgcggataacggtcgccatgccacggaagatgttgttctcctccagtgcctccaccagcttcttctcgaactcatcgggaacggtaaagccgccctcggtgtcctcacccacagacagggcattgcggacctcgccgtaatgaccacggttgcggatcatgttccagaagttctcggcatactcggcagtggcggtcggcttgacatccttcttgctgccgttcttcgggtcagcatggacaggactggaagtcggtgcggacagctgtgcctcgatctgtgcctgctgctccagacgctcgatctctgcacccaggtccttgacctcctgtgccatcttgttgtactgctccacggcctcagcctttaccagaccgttctcgccgcggttcttctccagaaagtccttggtctgctcccagagagtgttgcgcttggtgcgcagttccagaatcttactcatagtgtttttcctccatagattgatttgtggtgatatgaaaaacagcctgaacgcacatcacttcatgcactcaagctgtttcatcaggatattgtagggaatgctgccatcctcggtcttgccgtccagatcaaggacaggggcagaattagcaggcggttctaccggaggagccggttcccccgtgtgttttgcgatggtctgttccggctttatacccagacggttcaggacgattagatccatctgacggctggagaaaaggtgccctgccgtatccttctggaacggcttcttttcttcgccctcgcccggttcactatcagggtcttcttccggattctccggatctgccgggtcactgtccggctcttcctctttctttgcaaagaggatctcgtctgcaaagcccagctccaccgccttcttcgcattcatccaggtctcattgctcatgaggttggcaatacgggcatgactcaggccgctctttgcagcgtaagcattgatgatgctctccttgacttcgttcagcacctcgatggccttctccatgtccttggtgttgcccatcgcaacggtgctggggtcatggatcatcagcatggcgacaggactcatctggacagtatcaccggccattgcgacaacagatgccgccgaagctgcaatcgcatcgatcttgaccgtgatgctgcccttgtaatccttaagcatggtatagatctcggcggcggcgaacacatttccgcccggactgttgatccagacggtcacatccccctcgccggattccagctcatcccggaacatctgcggcgtgatctcatcgccccagaaagattcctcatcgatgggtccttccagccggaggattctggtatcatcactgtttttgatccagttccagaatttcttcatcgggttctccttccatttttccgtggcttactctcactcagccggttatcgctgtcaggttcttcttccggatcgggctgtgtctgtttcggctgattctgctggactgcggcagctttattctgctgtgccacacctgcatctttcagtttcacatagccgccgttcagatagtaatcgtcaccgccctcctctgccgggatgagatccatgttctccagacgatgcacatcattcggagaaaggaagccgttactgatgccggtcgcataaccgttcatccggctctggtaatcaccacggagcagaccatccacattgaattttgggaagtaggtatcctgctcctcttccagcagcagatccttgatgatgccctgctcgatgcggacaagccagggagtcagggagtgcatcacaaagttcagcgactggtattcgatgttggaaaaagtagctctcgacaggtcagccaccagatgcggaggcacacggaagatgcggcagatctccgtcacggaaaactgcttcgtctccaaaaactggctgtcctccggcggcagggagatcggtttgtaggccatgccctcttccagcacagccacgcgatgggcattggctgcaccgccataagccgcctcccagctatcccggatacggttcgggtctttcacaacgccggggtgttccagcacaccactgggctgtgcgccgttcttgaagaaagaggaaccgtatttatccacggcaatggaagtgccgaggctgttcttcatcatggcgatcggtgagaaaccgatcagtccattgaagcccagtcccggcacatggaagatttcgtcccggcgaaagtagaggtctttattctgctctcccggaacttcatccgtgtatgcatggtagatatagtagagctcgccactttcatctcggtcgacttcgacattttccggcaaaagcggatacatccccagcactgtgttcttaccatcccggacgatctgtgcgtaggcgttgccccagaggagcagatgggtcatcagcgtttcccagaagacaaaggatgtcatttccgggttgggctggcgatacaggatcttgtacagcggatgatcccgcgccttttccttgttgccgttatcatccgtcactcggtacagatgcagcggcagtgccgcaatggactctgccagcagacggacacaggcatacacggtcgggatctgcatggcagctttctcatccacctgctccccggcattggatcggccaaacacaaaggtctgcccggaatcacggacgttatccgtgacctgcggcagaccttcttttggctgttctgttttgggagaatcccttggattctcaaaccccatccattcccagaatcccatatttcaaccaatcctttcataaacaattgaacaaatatacttgctgtggtattataatcatgaattgcggtggtcgtcttcggacaacaccttgaaagagcctgatgcgtcgggctcttttttgtcttttttactgtttttccagttccggcagaccggcaaggctggtaccgagagatgcaacgcctgccacaatcgctgcgctgccaactgcaacccagtccaccgtgccgccgggcatctgtgtcacgaccagagccgcaccggtctggaacatcgtctttgcagcacggatgccggctgccttccaccattctgcactcatcagatacttcatagttcttgtcctccaaaatcaaaaatgacatgaaaaaagcaccctgacttttgccaagatgcttcttcgtacaatgatatttatttggtaacgtaggtactcagccttccgtttcctttttgctcaagttttcctgcttcgcaaagttctttaagcagtcggaatgccttcgttgttcctgcgccaatcaaatcctctacttcttttcttgtgatgctgccattttcctgcgcatattgaacaataagttgcttctgctcattcagcgaaatatcctcatccgcattatccgacacttgcacttcattgttttgttcctcgttcctattcggaagtgttacacggaaaactccttttgctgtttcaaactccggttgaaatggacaagttttatacgcacgttcgatttttccgattcctgtgccgtagctctcaatcaatctcatgcggtagaaaacagccgcaagatttggatttctcgattgtgaaacaccaagaaaaatggatttcagctccaaaccagatacaagacctccaagagaaacaaattcaattctgtcctcatagacattgaccagattgcttccactaaaagaataatcgcgatgaacgatgctgttcagcaaagcctctcttacagcttcctccggataatctctccaatcagttcgatccagccccgaaaatgttgctttcgttttgttgactaaatcaataaactgatagacatcttcaagctgcctcaaaatagatcctgtgaactcctttctatctcggaatagttctttgtccgttccttgaaagagagcaactttcgttgttgtctcacactgatccgatagcaacagcgcaagatttgtatacaggccatcttcaccgatcagtttgagagttcgcatttgtgatggtccgatttcaatcgaccttctctgcatctctgtttggagagtatggaacgtcaattcctgcttcatacttctacacagttcaaaagacctgccgctattttggagaatcatctcccggattccttcctcagtcattggctgtgtagaacttccttttcttacatacacaccgccaggtttcaaacctttttcacggagatagtacggtcgattcgttccggttgtcacatcaatttcgataacttgcttctcttctatttcaactgtgttgactctaacaaacggcattatgtctggtgccagggaatctttcaaagaatttacgatttggagcattaccccatcaggatcgccgatacctaaaaccgatccatcttttctgacaccaacataaaccgtgccgccctctgcatttgcaaatcccatcacctcttttcggatgtcagggacatactcttgcttaaattcgatattctggttctcgaatgctaacatcttctgctcctttctttctcgtttctttcttctttctttctcattgtaagagagaaagaaagaaaagtcaagaggtgcaaaaacaaatattttgtcgattagaaaacgatcatgtcacgttcatcgtatacacttccctgctgctgtccttcgtttcggatgcaacggtccagtgccatgatcgcagcgacgattccatcgatcttctccggcgactttgccttggtcggcttgatgttgccagccgggtcggtatccacgaccacattccccgccatccatgccatgaccgggttgccgccgtgtatgattcgtccttccatcaggagcttatagaactccttggtaggcgggctcatatctttgaaaccctgtccgaaaggaactaccgtgaagcccatcccttcaaggttctgggtcatctgcaccgctccccatctgtcaaaggcaatctctaaaatgtgataggtcttacccaactcctcaatgatcttctcaatgaacccgtagtgaatcacattgccctcggtcgccatcaggtagccctgctgataccagacatcatacggaacggatgccctgcgcacccgctgggggatcgtatcctccggtatccaaaaaaacggaagcatgatgtacttctcctctggaactttgggcgggaacatcagcacaaaagccgtgatgtctccggtgctggacaagtccagtcctccataacagtcacggcctttaagtgcttccatatcgattggctgattgccgaggtcatagatgtgttccgggataaaccgggtcagcgaggacacccacatattcagacgaagctgcttgaacacattctcctctgccgggttatccagtgcttcctgatatgcatcccggacacgctggatctgaatggtctgccccaatgagggatttgccttataccagttggcttcatcatgccagtcatcctcatctgtcagtccatagaccacaggataaaaggtgtggtcgatcttacgtccagccagcaggtcaagagctttcatgtgaagctcgtagcagatgctctccttgtccgtgccggccgtggtgatcaggaagaacaacggctgctcacgggcatcaccggaacctttggtaagaacatcgtagagttttcggtttggctgggcatgaacctcatccagcaccagacctgacacgttcagaccgtgcttcgtaccaacttcggcagacagaacctgataaaatcctgcgttcccgtagttcacgatgcgcttggtggctgccatgatcttgcaccgtttcaaaagtgccggggtcatctgcaccatctggtgggcaacatcaaaaacaatggatgcctgctggcggtcagccgccgcaccatagacttcggcagatggctcattatcggcaaaaagcagatacagggccacggcagcggcaagttcggacttgccgttcttcttacctatttcgacataagccgtgcgaaactgacggtttccctttttatccacgatgccgaacacatcccggatgatctgctcctgccaaggaagcagccagaaccgcttgcccgcccacttgcctttggtatgacgcaggttttcgataaaagtcactgcccggtctgcttttgcggcatcgtaatggcaggtcggaagcatgaaccggctgggtttgtagtccttcagtttcggatagttttggggtctgcactctgccatcagcttccacctcctcccagcagattctccatctcatcagctgcatccgcaggaccgccgtccgaagcaatgatccggcttcgggaggacggggtcagaccgaactgctctgcaaacttgttcatgatcttcagataggtctgggcgatggacacctgcggcacctgctgccagtacccggacggggtcttgacgatagtgccgtgctgggtgatgaactcctctgcctccttccatcgggcatacgcctgacagtaaccggcaaaggccgccatgtccacttcggtcaggatgccgatggcttccatctgtttggcaagtctacgccactctttctttgcttccggctccagccacttcggacaggccggtgctttcttattgggcttcggttcgctggtgttcagcggatgcttgcccggattaccttccagttccttcatggcggtcggctttggttttctgcctctggtagccattggcatctcctcctttctgcaaaaatgggtaaagaaaaaggacctccaaagaagtccttgtaatagcattttcccaaacaggaaacttttcattataaaaagcaaatagtttcccatttcggcaactttatataaaacacatcggatacgaggcacagccccttttcggggcgtgtaccttttggtgctgttatgcgttggggttggcttccttccaaacctcgtattcatcgaccaactccgcttcctcgatgacctgccagatgctgcaaaagcggcttctctgctgctcgatttcctctgccgtccagtcttccggcttgcggctcatatcgtggtaggcatccatctccgctttcgtccggaagaaaaggatctgcttcagcttcagcgtctcctcgttgttccgcaggctgtaccgcctgtcctctgccgccctgcaaaggcttccgaggtcgctgcagctgagggtcatgtcctgcttgaaggcgatctcgataccgatcagcttcttctcggtgtcggcttcctgaatgttcttaaggtaggtttttgctttgttcgtcatggtctgtatcctccgtgtgttttgttttccgtagggcttttcccttcgttgtgactgtatattaccgtcactgcccggacatagcaagcggctatgctgcacgatcatacacacctctttttgtcggatttatgtgtatttccacactggaagaatccgccactacgagcaaaagctcccgaaggagctctgccctttttcagtgtgcgttcctgatgcaccactcgattgcgtgaccggcatccgtgtaggtctcatcggaaatcttcagaagctccaatcggcactcaatcggtgaccagccttcctccgggtcttccacaaatccgtataccgctccctccagcatgccgttccagttcatctgggcaaccaaaacccggtcaccgaactgcatgatgctgtcgtagcaaggtctgagtcggtcgtagaagctctcgatgctgatgtcgtcctctggaaagtcaatcaaattctttttcatgttcgtatcctccgtgtgttttgttttccttgggctttgcccctttcggtgactgtatattaccgtcacttcggcacactatcaagcggctatactacacgatcatcttcccagaataccgggcagaatatacattactctgcatcttcggcatcctgctccatgaggtctacgatggtatcgtagaagaattgcgggtcgtaggccagcggctcccggccggcttccttatccatcctgatctggtctgctaccatgtcctcggcatcctccagtgtgaaggcatccttatcgctgtcatccatgtggttgtagatttccacaatgatgtccatcatccgtttttccatgtgcttctcctccctggcgcatccacgccgccacatctgcccctgtcttgggcgctgtcggttccttcgcgttttgccacccgtggcacaagcccctgtgtgggggctgtgtcgagggctgtcggtttatctggtcatccgtcccagcaggtaggctttctccattgctttctggatgccccagaccggaacctcaatgaagtcctcgctgtcattatcgcgggcttcgaggtcgccccggctgtctaccgctgccatcaggcgcctggcgatctccagcagagcttttttctcttccttggtgatgttctttttcatggtgctttcctccgtttttcttagttttccgtttcggtatgtgcatattaccgtctatgtcacacactatcaagcggctatactacacaaggatagccgcccggaactgtgcgtattacagcagaagaaaagggctgccgttaccggcaagccccatgtgtttctctggcttagtagtcttcttcgtcctcgtaatcttcttcttcgccccagtcatcttcctcttcatcccagctgtcatcctggtcttcttcctcatccttgaagtcccacatatcttcggtcggctggtttctaaggtctgggttctgctcgacatagtcggcaaccgctccgcaaaggatgtccagaaccttttcataggcttcctcactgtagactgcccaggcatctgcagtcagctttgcgattttgtcgttgcccttgactccaaggaaccgccctgcagggttgcaggtttccttgccgtagccgatgcccagctggtcgccgtcgttgtaaaagcggtatccgatgcggctcattgcccttaccagctcccctgcgaggctgtctgccttgcccgtatccggtaccagttccttgaaaagtttattgatgcggtcttcgttcttcgtcattgtcgtatcctccgtttttgttgttttcccctttcggtgactgtatattaccgtcactctggagcactatcaagcggctaaactacacgatcatcaagccctgtaattgtcatatttatgtgcttttcatgccagctttcggaagaccgacacgagcaaaaggctggtcatttccagccccttgcgcctgtcggtcttgcctttagcggatgatttcaaggtagcttacgttgccccagcagtccgttcccttgaagcggatgcgcttttcgttctccctgtcgagggtgaatttccgcaggagcttcatcttctggatacggttcagaaggtccttgccgttcttcgcatcctcaacgacatccctgatctcgaccaccgcgctgtcgcttccgtaccagaggttgctgagtgcctccggaattccgtttgcaaggtaaaggttgatttttgtgtaggtcatgtttttgttctcctctcagaatgtcatcgtttccagaatctcatccatgcctgtctcccagtcatggcggctaagttcaattttgctgtacatctctgcgctgtccggctcatcgaaaagccggaagcattctcttgccagctcctcgctggtgtgctgctggatttcatccggctgtccatccagccgtataaaggtgatctcgtaagtgtagcgttccatgttctttgcccctttcgttttggtagctgtatattaccgtcactgccggacactatcaagcggctaaagtacacgatcatctgcaccctgatctggtggatttatgtgtttatccggggaggtttccctccccgtttttcttagctgaacatctctaccgtatcatcgtcgatccagaggtgcatgccgtctgcttccatgattgcgtggtcttcatgaacctcagtgatgattccttcccggcttccgctaccatcgaattcgttccagtgccatgttgtctttcttccttttttccatgttctccaatcagccattttgctgtcctcctttgctttttgtagctgtatattaccgtcaccgccctgtgatagcaaggccataaaacgtcatattatcaacgatctttgcccctcatgtttggtacatatataacccctgattgacttgctatatatgtgtttctgcggcattatacacacaacgaaagcaaagaaaaccaaaccaaaaacggaggacaaaaaccatgaaaaagaccattacagaagttgaaaccgcaatcgaaaaccgcatcgcagagcttgaagaagaatacgagctggacatttacgaccgcaacgacatccgggaagaagaataccagaaagccggatggcggcacgaccctttcccagaggagcttgaggaagaggacgaagaagaggaagaagattggcactaccacagcatggaagaacgactgaacgaggtcggcatgagcatgagggatttcttctaaggaatcccaaaaggctcccccagcagaagctggggctctgcctcgtatcccccgttttggtttggtatgatacacaaaaccgctgccagatgtttgtgtacattatggcggcggttctccttgctatcgttgctttccagaggtaatatacagtaaactggaagggggttctcattcttttgaggcccccattttccgtctaatcggcttcgccctgcattgcctgatgcatcaccctgcggttatgcgctctggctttctttttcaggtcccttttccatctgcggatggtcaccgccttgcagtggtttctcgaccattcgtattcatccagaatgtatctgcctccgtgttccctctcgccataagccggcatctttctgtgtcccataggctcctcctgttaaaccaagccctcccggtcttttctggccgagagggtattttttctgatcgcggtatcttattccggcttcgttccgtcatccatctggatgaccgccatctgtccgaacatgctgacgaatgcctctggcacccagaagcgttccgtgtacttgcggatgaggtcttccgacagttctgcaaaatcttcctctcccaatccgcagatgaagaagtttcccttgatgggctgctccagctccggaatgtaccggctgaacggcttctcagtgaacatcccattgtcgtccgttaccagtgccacggcatccgcttcccacgggtacgtggctgtgatgcagtcgcagtcgaggatgcggtagaactctttcagggagttttcaatgtccaccacctgcggatgctccatcggcttgatcaggagaactttcattcgacccagccccctttcacgattgcccagtctgcaagatgcatcttctgctgtccgccccatgcaatgtcctctaatgcttcctccgttccgcagcgattgcagatctggatgtccgcccttcggctgaatgcctgctgctgatggtcgtagcagtcaggctttgctccgcacctggggcaacgtgggccggtctgtcgcgttttaccaaggtggtcgagcgacaccttgacctcagcttccgaagccacacggtggcaactgtccgcgccgtaggcaacgttaagatggcttccggtgtcccagttcaccaagatgtttccggcatcatcgaccccgttgcaggttccctgcgttccgatgggcggtgcctgcctatcatccatctcatcgaggacgatccggcatccaaccgggaactcttttctcaacttcttgaccattttctgatctgcgaaattcatgcctgcacctcctcgatcatccgctgggcggcatccttatccatgcattccttcagcgcaccttcgaggatgtgcatcgggaagtggaatgccttgtagccgtcatgcaggactttgtagtaataccggctcggtgcgtggtgtccgaagtcgttctccatgatgtagaccattgcggtcaccatctccggctctgccccttcccggagcagtttgatgtttaggacttccttgcggtagtagttcgggtagccctcataaaggtcgaggtttccttcatccctttccgagatctcccacaccagaaccggcgtgttcttcttcgggttcggtgcgatggtggcgcagccgcggaacaaaagctcccagcctgccagcactgcctgtcctgcaatttttgcatccggacaccggtatgccatttgctccaccgacaggttgctgccgtaggcgatgtaatatttcttgttcttcatttgaatctctcccttcggttttctccgctcttgtctggcggtatggtatatatcactcttctgccctgatttatcaaggccgatgagcatcatatactgcacaatgttttttgcttttgatcgtgtactcttacatcatctgctgcttcttcagataccggatggcttccgcccttccgatactagctgccagtccacgcttcagtgtgtccagcggaaattcccagtcgctgtatccgccgcgcagcagttcaaaatactcggcatccgggcagccaagccgccggtcctcgtgcatcacataagcgatgcagggctttgcctttttcatgcggttcccgttcaggttccagaccggaagctgaaactgtttcttgtagtagtatcttgggcagccctcgtaccggtccagcaggagctcatcatattccgagagcttccagaccaccgccggtacgctttcattggcatcctgctcgatggtggcatagcagccggtcttgctctttttgaacaggagccggtagcccttaatctcggtcgtgccgaccaccacagcgtaagggcatctctttcccatccgttccatgtcgaggttgcttccgtaggcaaggtaatatctggatgggtttcggctgatcagttcaaacatctgcctcaccgtcctctctgccagtaaattccacaccctggaaatcctctgtcccaagctcaatctgactgtcctgccaccagtcctctgccacacgctgggcttcctccacggtcggctctttcatctcggattcatacaccgtgatggttctctggtaggtctcggtgatggtcaccttaaaggtcctgccacccggtgtgttttcattttttaacgtgcttttcataaacctgcacctccttctaccacctcaagggcggttgcccgcccaaaaggtgcccgtgcatcccagcttatttgttccgctaggatgcgttgccctccatgttccgcagaaggatttcccttgccgttgcaaattcatccccgatgaatcccagcctcagcatccagcaccgcatcgcgtacttttcgttgtcggtctgctggggcttcgggcttgccgtcctgaccatcttggcaagctggctcattgcgaggcaaagctggatgtaggctttcatctcaccggcgtgcagtccgttgcgctttccgtccgctgggtctgcgaattggaaaaggcggaattcaatggtcccttttgtaaaggtggcatggaggttcagcatatgataccggcttgaattgtaatgctggcttctgccgtagtctgcaccgttgccttcgtaccagatgtcttccagcttgcgcatggtggtcggcttctcgcgattcagccggtcgaggaagcggtggttgaccacctgacaatagtgtccggtgcgtcctgcgtcgatccggatggctctgccaatctgctgttcgtgcgccgccatgatgttcacaaggttgcggatggtctttgcggtgtggtcacctttgccgatgtggatgtggaccccgcatccgcggcttgggctgctctttgcgcctgccttgcggagcagccggatgatctcctgcaggggttcgatgtcgtcgtaggtgaggatcggggtgaccagttcgcatttttctgcgtccggtccgtagatgctcacatccctctggaatttccaaaccctgccctgctggtctttgcaagcccagctgtaatatccgtactcgctggctgcgttccatgctctggttccgaagtactcggcgacctttcttgccgctttttctctggtgatgttgttcatctcgatctcaactccgatggtctggttcttcatggcttcaatctgctctcttgttttatcgttcatggtatgttctcctttgttttttccttgttttccctgtcggtatgtgcatattaccgtcaggtgcggataatagcaaggatataaaagaacatatattcgacaaatatcgagaggaatgatcgtgtacatttctgcagtttatccgcttgataatgtacattttcagagttaatatcgttacaatgaaagagggtctcgcatatttcccggcccccattgggagcttgggagcttacgctcccgcctccagcatctgcgccgtgtccaccccacagtcgggctgtgtcggctggttttcttcctgttcgaccgtttcccctgcggcaggatcgccgttctgtgccgcctgttttgcggctttcagggcatcccgctttgccttttcccttgcaaggaacttctgtgcttcctcatccgtgcggaaagctgcatggccggaaaggttctccatgaggatcttgcgtgtctctttgaaatccggaccgttcatgcccagccgcaggagccatgtgcggagtgcgtatttctcattctcatcgttgacatcctttgcctggatacgcttctggctgatagcctgctggttcatcagcaccgccagctgtgcaaaagccgtcagatgttcgtggtccggtgcagtcgggaagccggtgaagatgaccttctcggtggtgatcttcaagccttccagtgcagcaccatgctcagcctcatagtcgcttaccgcgttgatgaagttcatgatggcaaaggtgcagctatcgtccttcagcttttcgaccagcccctcttccacatggaagtgtccgccagtcgccttgccgatgagtttgccgcggctgtaaagaaggttgactaggttgcgaagggtcacaccattgtgctggctgaccggaaatgcaagttccaagtccagcggcacctcttccggctggtcttctgcttctgattgttcctcgctttccggctcccctgcatccggctcattctctgccgtgttatccagctccgccgtttcctcggattcgtcttccgcgggctcgttttcctctgcggtgtctgcatcttcgggttcctgctcgtccagagcctccggctctgcctcggtcatctgctcagtatccccagtcacaggctcctcctccaaatggtcggtcggctccgtgttttccatctggtcatccgtgctctcaatgctctcgccgccgcggatcagtccctcattcagcaaggtcgtcaacagttcggcatctgcattctcaggctcgaccagaaggttgccattccggtcgatggtgtagttcccaatgtcgtaggagtacagaggtgctttggtatagtaagggtggatgccggtcagctcctccatgcgttttgcgagggtctttctctcggctacgttcagtttaaatttcaacatgattcatcgctccttctcattcatttgtttttgtgcatcccgatgttcttttcggtagcacatatatcactctaaaccggatgaatagcaaggccattttccgatattcttcatgttcgaccatttacacaatggactgcaaaacctgttgtgtaaatggaaccaatatgtaagcccaccatatcatcgggtagttgtcctacctagtaatatagcgggccagtttattcttccagtcctgcgcaccatgcgatgccggccagaacaaaaaatgcgtttgccaagcaaatgccgttgccccagatacggtattccgccgaatccgtataagggtcagtgagccatttacggatctgcttctccgtcttcggctttttcgcgtgtgtcacgatcttacggtgcgtttcaaacacatctgcccagaatgcaagctcctcctcagtcggattttccgttccaaggtttctgcaccaccagtctgggaagccttgcagtctggcacactctgtcggtgtcaggcggcggacggtgtaggtcacaggtgcaggctgtacttccgggttgtcaatgaccagccggtcattaaaagcgtcctgcccgttaaaaccgcttggatgtgctccggttgccaccgttcccataacaccctcgttcagatgcggcacaggtgcgatggtggccgggtctttgtaatcccttgccatcagggtcggtgcgacttcttttgccacctgcatataggagccggtggtcatggcatacacatcctccggcgcgcagactgcatggcggtctgtcgcatccaaggtgaagcagacatcctcattgacgccatccccctgcggaccattttcatccttgcggccgatcatgttgccctgcaggacgaaggtctgcatctgatcactccgggtcgccatcaaagcaccggacttgccatgcagctcgatcagctcattgcgctggttcacatggaaagccgtcacctcttccggctgtgccacaaaggtctgctgcttcatccccggctctgctgccagtgccgctgacttctctcccagatcccggacttcatccctctggttctgggtaaaggcgaccggctctaccacacagataccgccctgattgcaggtcgggtcgccaccgctgcggtccagtgtccgagaggtctctgcttcatagaagccgctgtgcggattgtcggacatcatggagtggctggcttttgagcagacaccatagcatttcggaacgaacagtgtctggtcgttgttgcagccaagagtggcagatttttcttcctgccagatggctccctttccgccgccttcacatccggaacggatctttaacgtgaccgccggggagttttcaatatctttcaccgggctttccactggattttcaacagcgtccatgaccatcgggacattaccgccgcctgtaccgcaccggcttgtcagtgtctgtaccttaccatcctcggaaatcttcacccggctgtcagcaggatgattctccagtgcgatggcagcaggtacgacacctgcccggagggtcggtgaccgctcttcctcgtatccgatgcttctggcatttgcggaatgctcggtacagaaaccggcagcttccagaacacacggctgatgcccatgctcctctgcccggagggttccggtcacttcttcggaaacatccatctgtgtgccgccctgatcgttcagacagatccgtcctcctgctccgctgcagcctgcctctccagtgccgctttcagcaccggcggcagctctttgccacgcacggaagccctccgcagaataccgagacacgccttcggagttaaataatatttctggggcactctggtctgcaaaatctgcgacaaggtagatacgttttcttctttggggaacgccccaccattgtgcatcaagaactcgatacgcgacgctccatccgtctcccacgtagtagtcagcgtcgggccatcctttcttctcaggcgcaggcaccgaggcggacggttctttaacaccgatgacggcttcgaggactgctttgaagtcctgtcctttgtttgaggagaaggcccctggcacattctcccacacgataaatcttggtttttctccattggtcttacacctcatttccttcacgattcggactgcttcgtaaaacagactggaccgtgaaccatccagaccgtcccgcttaccggcaatagacatatcctgacagggactgccaaaggtgatgatgtctacaggaggcaggtctgcgccgctgatggcagacacatctccgtagtgcttcacctgtggcagtcgcttcgtcgttgcccggatggcaaacggctcgatctcgctgctccacaccggagtgatctgcccggtcagaagaccgcccaacggaaaacccccggagccatcaaagaggctgccgagggtcaaggtcttattctgttctgcgctcatgcggaagcctcctctccgagcatctgctcttttgctttctggtaaaaatctctggatacttcaaatccgtagctgttgcgtcccagttctcttgctgctctcagcgtggaaccgctgccggcgcaggggtcaatgaccacatcgccctcatctgtaaaggtctcgatcagtcgtttcagcacggagatcggtttctgggaaggatggatcttcgggtattccttgccatcccgcttccagtcaaaccagttgaagatcatgtggggctttccatcctcaccgagattgcggaacttcgggagcttgccccgatacagcaccagagcgtactccgttgcacccacgatcttcatgttagcttttaagacctgcgggctgtagttcttgcagaacaccagagggatataatttttgaagccgtatttctctgcttcggtgatcaccttcggaatctgctggaacgcacagaacacgatcatgcacggtgcatccttctctcccgtgccgggttccttcttcagcaggcggttgcagaagtggaaatactctgcaatgttgaaggtgaagtcggtattgaacgccgccttccgtgccttgctgctctccccgtttttgttgtcgccatccacataccagtccggccggctggcgtagaagtccgtaccgatgttgtacggaatgtctgcgatcaccagctgtgccttggggatgttgtaggacttgaagttctggaagttgtcatggatgaggacacatttcacatcaggcatcggcatcctcgctttccggctcgaaggtcgccacttcctcgaacttcagctcctggccgtcacggacaacaaacacatcatcgtagtggccatcgctgtgctcgatgtaccgcttcacgatcacatccacgaacttcgggtccagctcgataccccggcacacacggtcggtttcttcgcaggcgatcagcgtcgagccattgccgaggaacggatcgaggacaatgccgttggtcatagtggaatttcggatcggatagctcatcagaccgatgggcttcatggtcggatggtccttgttggacttcggccggtcatactcccagatggtcgtctgcttgcggtcggaataccactggtgcttgcccttctgcttccacccatacagacacggttcgtgctgccactggtaagggctgcgtcccagcaccagagcattcttcttccagatacagcacccagacaggtagaacccggcatccttgaatgccttacggaaattcaacccctcggtgtcagcgtggaagatgtagatggaaccgtcatccgccagatgaccgtgcatctgctggaacgctgccagcaggaactggtagaattccgaatcacccatgttgtcgttcagaatcttgcctgccgtttcttccacatccacattgtaagggggatcggaaagcacaaggttggctttggtgccatccatcaaggtgtcgtagcattctgctttggtggaatcgccgcacagaacgctgtgctttcccagatgccagaggtcgccctctttggagaagcatggctgctttagctcggattccacatcgaagtcatcttccttgacttctttgctgtgtaccttgttgaacagcgtctcgatctcaggcgggtcaaagcccgtcttgccaaggtcgaagttggaatcttcgatatctttcaacaggtcagccagcagggaatcatcccatgcacccgtgatcttattgagcgcaatgttcagggctttctctctggtcttgtcgatgtccaccaccgcacaaggcacttcagtgtagcccagctccatcgcaacggtcagacgctggtggccgccgatgatcgtcatatcggcattgaccaccagcggatcagcgaacccgaactccgtaatggagttcttgattttttcgtactccttgtcccccggcttcagctttttccggggattgtatgcggccggcttgagtacggaaaccggcagcattttcagttcagcggttgctttcatgtaagctcctcctcgttcagattcacacgcgcatgaccccggagaatggcacgaaaaaagagccgaacaaaaagcccgactccatctcatcgccatcctcctgcggctgttcggtcatctcgcaccattccgggttttccccgtttacagatgccagcaccttatcttccgcatcgtcaatcgcatgtacacaaatcccaccggtgttgaacatcgggaacacaccgataatcttactcatcctcgtccactcccttcactccgtatcgataatcccaatagcagttcaggctgcaaaacttccgcttctgctttccctcagctacagcatggaattgccgaccacagtttttacagacctctatccggaaatgcttatgctgtctgtaaaattcatcccggcagtcttgggaacagaaccgtctccgaccactgttccctctctgcacgagaatccgtccgcacaccgggcagcgccgttcccccgacccatccggcggctgtaactggcagctccctgtttccggcaaccccagttcccggcagtaatccgtgacctgttccaaagaaaaccctgtgtcttctgcgatctctgaacactcaaacccggcaagccgctggcttcggacttcttctctctccgggcggtactcatagccctcaaacacacagtccagccggacaccgttctttaccacatcacgttctatgttcagcggttcttccatttgcatcgccctccttccagcgtcctttgtttgcacaggcacggctgcaatatttccgttccagaccatactggtgccggtaggaaaactccccgccgcacaccgggcagatcttcgaccgcacggtcttccagttctccggctttggatgggtgttgttccaccgtgaccggcattccggagagcagaacttccggggtctgcctttatgatttggtacgattgccgtaccgcactgagggcagaaagaaaaagccatgtccctgatcatctcagccgtgtaatcttccatctgccctcacctcactctcatttttcgccgtttcttcggcggtttcttagaaaaatctcataattcatacgaaaagcggcgaagtggaaatcggcactgccccgccaggttggatcgttgttgcggcggccgattcccgctcgcccctgctcctcccggaacaagctaaaatgtgcgaaagctccctgtttacgagaggtttcacacactttggttcatttcggggaaaaagaatggcaccggaaccgaagctccgatgcctgtacattttcctgtttcattttgcgccgttattcctctgacccccggcctatgaattttgcggtttttcacagaaaagggcgcaccggtctccgtgtgacctcactgtagagaagtgaccccggccccggcgggggtgtcagtaggtgtaggtcgggttgatgtcctcggtcagcgtcttcttatcgtggcagctcttacagagtggctgccagttgttctggtcccagaaaagtttctggtcaccacggtgcggaatgatgtgatccaccaccgttgcccggacatacttgccctgcttggcacactgcacacagagcggatgtgcttcgagatacgactttctggctttctgccaccgcctgttgtatccacgcttcgccgccgggcgaatgacctctgggtggagaggcaggtgcttctcacagtaaagccggccgggttccaccagctccgggcagccgggatgacggcacggtgtctttggtctgtacggcatgggtcagtcctcccacggaagaccagccttaccaaagtgaccgtaagcactgaccttgttgtaatctacatccagcagtcccagccgcttgatgataccctgcggggtcaggtcatagctgtcatggacgtaggcttcgatgaagtcaagggactgatgctccgtaccgaagcactccaccgacacaccgaccggctgcaccacgccgatggcgtaagccagctggacttcgcacttgtcagcgtagcccgcctgcacaatgtccttggcaatcttcctcgccatgtatgctgcagagcggtccaccttggtggggtctttaccgctcagagcaccgccacccatgcgaccaatgccgccgtaggtatcgcacgccagcttccgaccagtcacaccacagtcagcgtaactgccacccagcacaaaacgaccggtcggattgaccagcttcgtgaaatcaccgtccagtccatactcgcaggcggcaagcaccatcatggattcgatgatgtgccggaagtcgctgacctccacatccgggctgtgctgcacggagcagaggaaggtggtgatacgaccggtgtcgtaatcgtagctgacctgcgccttggcatctgcccggaacatcttagacggatggttcttcaacagctgcaggaacttggtggcgaccatgtacgggatcggcatctgctctgccgtctcgttggtggcgtagccatacataattccctgatcaccggcaccgcccttgtccacaccaagcgcaatatccggcgactgcttgtccaccagaatgccgatgcgaagaagctcggtcagattccaccccaacttttcggtaccgatgcggttgaacacatcgtgaacgatctgctgatagtttggccgataatcggtggtgacttcgccggcaataaagagctggctctttttcagcagacactcgatcgccacacgggcgttcctgtcatgctggagaatgtcggtcacgatggcatctgcgatctggtcacagatcttatctggatggccattgctgacctgttcacaggtgatgatcttactcattggtttcgtcctccaatccaagctgtacctttacagctctttctatttcacttacctgcacttcatccgtgcagctgcacagtttcctgtgtaatctccacttcggaattgcagtgatctgctctgccagaacaacagaatcctcgtccagcagatcatgaataatgcagtgcgtcggcagttcaattctcttcatctgactagtcagcgggatcacagtgaccacatcagaattcttatttgccatatcattgctgatgaccagcaccggacgactgccctcctgcactgaggttccagtgttctctctcaaatgtgcgtaccagatgtccatccgctttggcggctgaattctggtgacatcaggaagcgacttcttacgtatttttacaggtcggttctttctgcccatcttatcctcccccttccgggcataaaaatagccctgggggaatcaatcctccaaggcttctgctctcccggatttcctccgggcctattttcatggtactagcatagcacactttgtccgccatgtcgtccacgattttactcatttgctccggccattctcgtctggccttttttcatgctcccatcataacacactcctgccataaagtcgtccacgattttactcatcacaaaaaatccacaaaacggcaaaaaaaatcgaggcccctttcggagccccgtgaatcaatccttgccatagagccgtgtgaccaacttgtccagcgcacggttctttttgttataagctgaggaacgttcaataccgaagtggtcgcagatcagattcacatcgctgctttccgtctgatagaagcattccagaacatacttgtcatcttccgtcagaccatcccacgctggctgaaaccagtccatgtactcgaccgcctgccgataccgttctttcagaatatcaattttctcgatgccatccagaatcctctcctctcccgcctgcggattgtgggcgtgtggcatgccatccatgttcgggcttcccacacccaccattctgtcactctcaaccgtaatctcatcttttgtattgcggataatgaactgcatattatcgtaatcaccgatagccttaattgctgccgctctcttatccaggtacttccacataatgctcatcttgcatacctccgaatttttattccactcggattggcatgttttgtctttgtttgtcatcgtttcccgttttatgctgcttcaacttcttttctgatacgggccatcagatactcaccgtcaacatccgtcaacactccaaaccatgccgatcggaaaaagttctccaaacggtccactgtgtgttttgtctcttgaccgtcgggatgccgcatctgtctgcggagtgcgacccggtagtcctctgctgccgaaataataatcgcattagccagattctcatacggttcaaattcacttgccatctttttatcctcctaagttagcttttactgcatcgatcagctcctcctgtgtcgcatccttacctttgagcacccggagaatcctctcatctatagtgccagatgtgatgatatgatttataaccaccgtctgagaattttgtccctgccgccacaatcttccgttggtctgctggtaaagttccagcgaccatgtgattccaaaccagatgatacagttgccgccgctctgaagattcagcccatgaccggcagaagccgggtggatcagaccgaccggaagctgaccggcattccaccgcttaatgctctcgccgctgtcgatcttgtcatactcgatcttcttctcatccagtcttttcctgatccgttccagatcatgctggtaccagtacgctaccagaaccggttttccattggcggcctcaatcaggtcttccagggcatccagctttttatcatggaactgcatcacctttttgtcatcggtgtagattgcaccattcgccagctgggatagttttccgcagagagcagctgcatttgctgctgtgatctcgttttcttcccccatgttcagcaccaattcttttttcagctcatcatattttttcttttccttttcatccatcgtgaccatacactcggtcacgaccttttccggcatctgtaagtaatccgtagacttcatggaaatggtcatgtcagaaatctttttatagatttcctcctcagcaaacgggagcggcttgtaggagtagaccactgctccgttcatcttgtccggcttgaagtaatcagcccggtacctcgtaatgaaccttcccagccgctttcccttatccagaagcttatactcagcaaagagatccattaagccgttggatgcaggtgtgcctgtcagacctaccgttctttttatcttcggtcttaatttcatcaaccccttgaacctcttactgtctgaattcttaaaagaactcagctcatccaccacgagcatgtcaaaatccagaacggctccgcttttttctaccagccatgccacattctcacgatttatcacatacacatccgcgcttcgcataagtgcgacctttctctcctgttcactacctaccaccacgcttaccctcaaatccgacaaatgctcccattttccgacttccgcgatccactgatctctcgccactctaagcggtgccaccaccagcacctttctcaccagaaagaagtcatagaccagatcaaagattgcagtcagtgcgatcgctgttttgcccagtcccatatccaacaatacagctgcctcttcatgggtctctatgaaatccacacagtacctctggtactcgtgcatattctccctctttaacttttccaatcttctatctccctcattaattcctgaattccctgttcgctgtccacgacccggacatgaaaccccaattcccttatttttcgcatctgtacctcctgcagcttccttggcttctcgccctctttcttcagttccacgaaaattactagaccaccgggaagtaaaagcagccgatctggcacaccagatacggaagacaaaaacttaaagcacctgccacccctcttttctacctcgctccttaatttctgctctacgtctctctccctcatattcttaatctcctctataccccaaaacccgccctgcgcggcaccgcgccatccttcttgtttcgtttttccttatctgttgtcttttttcggcttctgttcccctttgccattttcccgtttttccttgtatttacgctattttttagggttgatataaagtaaaaaggaacaggttcacaacaagcacgctttttttctctatatagctatttcccctatatgcgtattacacactcttctgttttttctttttaccaaaagactctatatagaaaaagttggtcttgtcccatatagttgacaccttttgaacttagctaccgcccaccccgccctctccgctatacgtttttcttttgcgttttgcttgttctcctgttcccttgttacctgttttcttttaccgctttcctgtcacttgttccctgttcccttgatttttcttacttttcctgttcctctgttctgacgtacactctctgctttccgtagatttcctttttcctacagtctttcgatctctcccagcccggaatctgcgtcatgagcgcggcgatagaataagaatccgcaggtttcatatcagacggcgagcgtccgaagcactcgctccagatctccacattgctgacatactccctcttcaccgttcccttttctaccgtcggcccatccttctcgttgatatagcttcttctcgcatagaggtccatcttctcccagcgttccggcagaagcatattcaggtaatcttcgacaattccctgacgctcatccagctccatcgccttcttctgttccatttctgcactctccagcagctcaccctctaaatacaatttctccccttcttcatagtacttcttggcttccgcccagatctggtctttctcctcctgtgtaaagtgccacttacgcttctgctctgtctgcttcagcttaacgacccagaagcggcggttgccggtgatatcacgcaggtatcccctctcaccgttgacactggcaatcactacgcactgccgcgggtgggattccacggtgcgtccgtaagaaggacgatacttatcatcggtggtcgtaatgaaggccttcaccttttcgatgtccgccttcttcataccggcgagctccggaatctcaacgatccagaatccctgcagtttctctgcggcagccttatcgttcatgtccgtcagactcaggttgtcggcatagtattcctctccacacagatcctttaagaacgtactttttcctataccctgcttaccatctaataccggaacagagtcaaacttcgtgccgggatggtagatacgggtgactgctgccaccagcatcttccgggtcaccgcacagacatacagagtatcgtccgcatcaaaataatcaatcaacagggtatccacccgttccttaccgtcccaagacggcaggccgtccaaataatccctgactgggtggaaactgcggtcgtccgccactttcagaaagctcacatcgtgattgcgggtagagaatgaggtatagcgggtatcaaggatggctttcagctgtgcggtatctgcatcgcgccagaacttgttatcgtccgggcggttccacggaacttctcctgtgatctggatgcggtttgccatctcgttaaacgcaaaattctggaagtccgggtcattattaaggatcagcacctcgttaaagacactgttctccagtaccttgcttctgggcatataccttaacttctctctccagtcctcaccgtcatcgaagtccatatcggcttccgctttcttctcctctgccgccagcaccctgaccttatccagactcatcgcaaaatcacacattgcctggaagctctttttctcatcttcatccccaaacttgtgtacccgcacaaggtcaaaggaattcagagaacggccacaggcggggtcagatgcatggaaggagtgcgcgaacttctcttcaaaaatctgcacgccggcagaggaatccgccgggatataggaatagcggccaggaatgttggcagacggctcatagacattggaaaggaaggtgtcgatggcttcacggatcggataggcgcggcagaacagtccaaccacgccgccttttgcctccgggtcctccatcttcttgccgctgttttcctttatctcgctctctctactgctggtcggaagcagagaacagtcctgccagttagggtgcaaagaaagaaaaacatccgggtcaagccattcgccctccaccttttcacagacatactctccattcgatggcgtagtcggccagtacatcagctgatgcgggcgatacgagcattcatcaaactggtcgatgccccattcggctgcgaagtaccgggcaatggcctggtattcatccggggtcacatcacgggtcagcgggatgatgatgcggaaacgaggtgcttccggggtgtgtccgtgggtggtatagaggacagaggtatacgaggccagcatctcatagctttcgatgaagcctttttcacccttatccacatccatcgtcagcatagaacgactgaccacattttctctctttcttctgccgcccttcagctgaccaccgacaaagccgcccttatccttggcagcttcacgctcggcgcgcttcatcttctggtattcctcgactgtctccgtggttcttatcgtattttccagccggccgcacagctccccaaaggtgatcgtcttattcgaccatttcttcgccatgcagctgttgccgtaggcaatattcaagtctctcatcgctttcctcctacacttcttgcttctctttccatttccttactcacgctccataaccggcaaaatcccgtctgccttcagaagttcataaataaacagccggcctttctgcgtccagagcgtatgcatggctgtatggttatcctcgtcatagaggtaagtcttgctctgggtgtagccctgctcggcatacttctgatacaaaaaccatgtcctgccctgcttaaactggatcttcttttccttcaggatcttattgagctttttcgccgacatcccgaagtcctttgcgatctgggtaatggttacaagatccgggcaggcaaggacaatatcgtaataggaaactttcggctgcatctcggcgatctgctgtgccttgactgcattctccagttccagacgtttcttctcttcgcgctccttcttcagctctgtcagcgccttaatcagcaaatccggattttccaacacatcatcaatggcatacagaccatgcttgcggatggacggcagtacgtcatgcgtgacccaacgcttgaattcctttgcctgcggtttacggctcgtgaggatcagagaataaagcccggcttcgttcactaccaccatctgctgatttccaccaagggtctcaatactacttagacccttttcgtcatcatccaaacgccccactgccattgtggggttgatgatatccagcacccgacacacatccgctgcaacaaaccatacggcttcgtccttataatccgtcctaacctgctgaccctgataatcaaaaacttctaacataataaaatgacctccgaaaatctatagagtaagggagtgctcccctctaccacgccagattttcggaggtcttttataacctgtttctcttaatttttttcagtttttcttgttcctttttctcttgtcccttaatccttcatataaaaatccgaagtaaagccatctgcccgcaaaaccagccccggtgtccacggcggggttcgtcccatctgctcacagattgcttccaggctgacccgtgggtctgcttcgatgatcagctcgtcatgcacatgcatcacaatggaacagcagcggagtgtgcgcatggcatagcagaggatatcacggctgattgcctggatcacgttctcggtcagcttgccgccaaagctctccagcctctcccacttctttgtaccgccaacaccctcgtaggtaatggaagttccgccgaactggttttctcccagtctcggtttcacatacgccaactttctgccagagggaagataaataaagagaaaaccagactggtaagtgaaccgcaggcacttcacctgctgtggctctttggtcttgatgacatggatggctgctcgttcgatctcgccccagagccggacgatgttcggattcgctgaccgccaggaatccaccagcggtttcagttcttcctctttcatgccaagttccaaagcgcccatcgctttcaatgcgccaacggagccgccgtaaccacagctgagttccgcctgtttccctttctgccgcagttcaccattctcaccatgctttacgaccggcactccgaacatacgggaggccgttgcacagtagatatcgccgccagaggcaaaaacctccatgcgccattcttcccctgcgatccaggaaaggactctggcttcgatggcggaaaagtctgccacatagaaccttgcgccctctctggggatgaatgcagtacggatgagctgggacaatgtatccggcacatccccatacagcatcttcaccgcttccagatttccctgccgtaccagtgctctcgcctctgccagatccggcagatggttctgaggaaggttctgcatctgaatgaggcggcctgaaaacctgccggtgcggtttgctccgtagaacatgaacattcctcttgcccggccgtccgagcaggcagcattcttcatggcctgatactttttcacactgctttttgccagctgctgacgcagacgcagcacttcccggatctcctccggtacttcttccataagagccttgacctgcttcttacccagactgtctgtctccactccgttatcagcaagccacccggacaactgggatacggaattcgggttctcaagtgcagtcagctcctgcatctttgttttcaattcttccttgatctcggtgtccattgcaatggcgttctgtaccagcacgccatcaatccttacgccacggtcgttgatttcctgatcgatagcatattcctcccatacggaatctggcaccgggaaacgctccagcttctgctggatctgcatctcgacctcaacatcccgcacattatattttttgaagacatcccacttatccggtgcatcggagggaagattccttgtccgcccaccattggtctttgtcggtgcacagggtacgcaaaaataacggatcaggtctttgccttctcccatcttctgcttatccagccccaacactgcaccgactccggccagagacagtggcagtcccatataggcagaccagaccatcgtacacttccactcctccgggttcagatactccccggtcggataccccagataccgggacaggcagacacgctcgaatgaggcattgtgtgccagcttcgtcacgctctcatcctccagtgcggccaatatctcttttggcagcttctctccacacgccagatccacgaccttgacctcaccgccgtcactggaatagccaaacagcaggatctcaaaatccggggattccgtgtatttatagacgccgcacttggcaaggtcagcagaggaatacgtttctatatcaatgtgtaattccttcatggctacctccttacccagtccgtctgtgcatcatccggctgatgctctttcgctggtctgtatactgttttttcggtgtctgcttgatctgcttctttttcttctggtccttcttctgcttctttttatacatacagttctctcctttgcatgatctgccagccgatgccttccagcgcagtcgcacggtcataggactccacatcctgcgaagcacgggtgaccgcattggtcagcccgtaaagggaaaggtcaccgccttccaccagatacttgaagataccgttctgctcatcctgcgtgataccaaactccctgccggtcagttccacgacttcctgcacattgcccttgatcgggataccggccgcttctttcagcttatcgactacctgcgcaaagcggctctcctcgatggctgccattgtggtgtcgcgtaatttcagcataaaggccttgtcctctgctttcaaagtttcgtccgagtacagtgtgaagtcctctgccatcttcgcctgccggccgacatggttcctgcgctccccgaaatcgtcaataataagtccattggtgcagaccaaacggtacaccagcggctgtacggacactgcgccaaggccgacttcggaattggagattatgacaccagcctgtacgatatcgcctttccggacttccatctccagccgcttattcagaatcttcagatagagtctgttctccgtcacctcacagctctctacgctgtatccgtcattacctgcaaacagcggcagcaccgcagaggcgatctccatgttgtcgatccttctgtatctttccgagagaagtgctctcgccacagggccggcgccataatccatcgaccggatcatgtaattgctctgtctggtatccagccagacgttcacattctctgccagcagttccggcttttctttctgcatcaggtcataatactttgccgggatcgccagcgtggatgccagctgacgatggaacagctgtgtggttgcaaaaggagcctgctcccccatctggaaagtccgtccatccttttccagcctcatgctctgcgccggagcaatatagtctttctttgcctggttctgccgctgaagctccatcagcacttcctgcaaacttcttcctaccttcatcttatttctcccttccgatcatctttacaataaggttcagtgtttcccggatcgctttccggtccatccggggcttttcaatcagcctgagaacctcctcggtctcatcccgaatattcagaagtacctgcttgtagtgatccgcgatctcgtcatccgtgatctcctctgcatcgctctccacaccttccagatactcctccagatactgccggatgtcggttcccatatagtcctcgaccgcatccatcacatcaaacacattaaacggggtgagcagctcaccacctttgatttccaatacatgtggcataattttccctccagaatttatgtaattctgccgtgtcccgacagaaaaaagttaaaaaaagaggggcagcggaccacccctcccatcatcagctgaggaaatcgtcgtcctcttccgttgcaaagtcctcctctgcgcttgccttaccgcccagatgctcaccatcggcgatcttctgcaggttgttcagcgaacacgcgatgcccttgctgccagagctgttgaatgcatagaacgagatggatgcacggccatacacaccggagtacacctcggaacgctgcaggatcggctggcggtcggcatccacgatgccaggagcagtcgtattgttggcgttcaggaagtaatgccctgcgtaggactcatcatccggcttctccacatcgccatcacgcagcggtgtcttcagagcagccagcggaggtacgctcttgccattgcccttcagctttgcctcgccttccttgtaggcggcttcgattgccttcttgatcttctcgaccgtcaccgtatcctctttcgggatcagcagacacacggagtatttcgccgtgccgccgttgatgctcttcggctcccacacatttgcatagctccaacgggtcttcggaccagtgatcaccttcatcggatttgtcattttgtttgccatgattaattttcctccttgaaatcatcgtttatcgtattcatctcaggacgcttatcatcccttgacactaagacaggtttgccctggggttttataaccattgcccccagaatttcttcaaatttctttttgcccatcatcttctgcatctcggtcacgcccagcacccgtttctcatacggatcgtacccggcggcggctgctgcttctgcgacagacttctcgctggtgtacttgcgaatggatcggccttccaccagcttatagccgtcccacttcttaccagcaactgcttcctgcagggcatactctttcacatcgtttgcccagcgaaggagactgtccaccttttccagaatctccacgatctcctcatccgaaagcagaggcggcgcggcaaactcataggcagccagttccagattcttctttgcccgttcccggcagatatggcgtgctttacagaagcggcaccagtggccggcatggaactcgccattgccctcgtccgcttccagtgcagccggtttcagcacatgctctgcccagtcatacaattcattacgggaaatggaatccaccgagatgtttgccttccggggctggtagatggtcatctgtacggtatcgatgtcgtacagcgggtcgaagatttccagtgcgcccaacgcataaatgcgcatctgggtattcccgatcgcagagacttccactccaagtccatacttaaaatcaaccacattcaggacaccatctgcgatgatgatgcagtctgctgtgccgaagccgcctttgacaaagcgttcgtactggatcttctgctccaccagcacaaccacatcctttgtccgctgccttgcttcctccaccagttccatgacataatcccggtatccgtctgcacactcctgcatttccggattataataagtaaggttctccaccgggcaggccatcttctgccccagagccttcttcagttcatactcgcacacctcatgggcatcagtgccctcctgtgcaaagctggtcgatacatccggcatatcggcacagagctttgcactcggtgtacagtttatccagcgttccgagctggatggtcctttttcagaatgcgcactcacagattctctgcctcctccatcaacacggcgtagtcctccggcttgatctcggaaaggcggtttgctccgtgcttgaccagaagctcacgcacctctgcggtcttgccgccggaagaaaggctggagagtttcttgcggacatccgccatcgtgtacttcttctccggtttcttttcctgcttcggcggctctttcttctcctcaacctcgaaaggcacatccaccttttcttccttctcgctctccgccggggcttcctcacccgccagcttcttcagatcctccgccagaacggaataatccgcagccagcttcaaaagcagttccttactcatcatcctcatcctcctcttcgtcatcttccagcaggtcaaaagcagtacggatgacacggtccaccgtacactttggaatgcccggttcctgttcgcacaccgcatcgatcagaatcttcagatccttctcgcgctctgcttcctggtcttcgcaaaggccaaacgcctcagcgaacttatcgattgcatccatggcacacaccacatcattgatggccgcactcatgagatccattgcctgcatcttcacttcgtactcgttcttacacatattgtttatctcctttatttgttttccggggctttgccgcccctttcacatagccagattttcaggtgcttttataaccatcggcatcagacttttttcatcgtgacccggatatttttcttccgggcatattccagctcctgcttcattccatccgaaagctccgtaccgatcacccacatctcatctgcctcgtccagccacaggctgccgtaggccataccgagaaagcgctcgaacagctgatcgtcattgagcatctgggtaaaatagagatgcggtgcaagcggcagatacccggcatcgattgcaagcctgcaggctgtctgtgccttttctacattccgctttcgctctgcctccgggtcctgcccagtcggccgatacggtgaacagatatatacttttttcatttgtgtgcactcctttccgggggcttatcgcccccttgcacttagtcaggtttgaggggtggaattataaccccatacccttacgaagatttttgagtgccgcatccagatgcttgtggaccatcggctgggaacagttcatcttctttgccatctcctcctgtgtctgatccggatcttcatagaaggcatgccggatcacttctctctgcttatctgtcagcttcttttttgcttcttccagcttcctgcacagctcctcttcccgttcttccgcctcctgcacatccgtgaaatctggtgtgactgctttgttttcccagtccgtaccatcgttgctcaggctgaaatcgctgtggctctgttcgcggctgtcactgttatgatccagccggtgtgtaccaacaacatccagcggcatcgcccacgggccattcatgtactccgtttccggcacaatcatgatgaggtgcttctgtccgtcgcggtccatcttgactctgtgcttgcatccggccgtaacattcaggccgccctcatctgcatacacacacgggtattcgatctccgtgcagcgatccactgcataaacagtggcatgtccactgcggctgtaaataaacaggccgctcttataaataatgaagtgtgcgccggccacatcgccatcaaacacgatctcctcattggagttacgcagttctttggcagtcgggagctttgccagttcctttgtgctgccgaccagtttcttcagttccttaaaagttgtcttattattgattgtcataatggaatctcctttttcgctgaagcgcggcgaaggagattccaagaaaaaccggactgggtagagactttacccaatccgtccacggagcctgtctgattgatggcatggcgaattaagggtggtctccacggagatgctcggatggcttgtccatctttgcatcttccgtatgaaaatcatccttcgccatttgcgctttaaatttcaggctcagtttattttgtttttcgtccagcttcctttgggatggctggcttgccacccacgggctttcgctgactaccctctgctatgtacttctccactaaggagctcttgttctctgcatctgtggctcctcctttctaaccagccagattttcggggttgttttataaccatctgggaaaaagttttttgttttacatatctccggttctcgatggctctggttttttatggtaggatatgatatgataattttagaagtgtttgtattggtttgtatgtgttacacaccaatttgcttagtgctttggatcacttcttttctccttacaagaataatcttggtgttcctcttgctacgctgcaagtgttagcagagttagccgagttagccattatgaaaattgaggacaatcatggaaaaacaatgttcaccttatctctgcggtggtgtgtttttcttattgctgacagaggcaaaagaaaaacccgcttctcgcagacaactgcaaagcgggttaaaagaccgtgtttcaaataaaaatatacttgaagctcttattcaacttatcgtaccgtccttccatcagccttccgtcggaaagacttttggtggcgatacatcagactatcgggcgtgtaaggtttcacatggattaaatctcccttttgatgacaccacagaaattgatggatttgacaatcgggtcaaatcacaatatcaaagcgtggtacgccaaatggacacattcgttgacaattttctgcatactaagtccgatgagaggatgcgttggcttatccaggcaattctcactctgctttcggaagatcactctgtcactgatggcactcttttttatctttctgaatctccgatttctaagaaagagcttctggccctcgaccaatactgcctttcttcgcttcttcttgctgtatggcactatattgttgtgaatcgtccagataatgaaaagggacgtgcaacttttgaacagtttcacgaacgtgcagatgaagtaggtgcccgttggaaatttatcagtccaatcggaaaaacctatccgcgacagatcacatttgatctgttctctgttaaatcagaaaaaatgcatgaagaaaacagcggcaattctgcgaaggatactgactatagcgaaccgactgttgaagtctatgaggctcctgttacaaatccgttgactggtgagcgtatccttgcacagttccatgttgaagcaaaagacggcggtattgcagctggtatcgtgtatggcggcatcaatattggagatcggaggaagaaaaacgatgagtgacaatgaaattgcaaagcaatcacagagtttgccatccatcaatatccatgctgagcatgaaggtgttgccataggatatacagattctgtaaacacaaccttaaatgtggttctggtcgatggaaaaaagagcccactcagtaaagactactatgctttattgatgggatatgacccctttgagaaagactatgtgctggtttcaaaagaccgcgcacttacagaatacatacaaaatgatgtcaaaacgaagtttagtgatttgaccccagaggcgattaccgctatcaaggaaattccagctgtcataagctgtgaagcggatggcaccaaatcacagcaggctgtgttcgcattcatcaatgatattcggattcaggaaaacggaatcaaagtctactttcagaaatattttccgtttccttattctattctccgcacttaccagcaggaactggcacttcatctgtttgaatacacacgcacacattggactattaaaaatgttgatttgattgaggttcttcaagatgccggagtctttccggggaggtagcgaaagatgtcggataatttaattactaccgatcacaacctaccggttcagacatctcaaatgacagtcactgcaagcggcaacggtgtggccgcaggcattgttcagggcggcatcaatatacaggaagcgcatctcgaccttacagcgcaacaagctctcgccctgattgcaaaaatggccgggcctaaaatggaatcccatgcagcagaatgggccctgctcaacactgacatttttaatgtgtttgttattgaaaatgagcgatacgactgtggagctttttgcattgacaggaaaactgcactgcaaaaaaacaccagtgcccgataccgtgaccattttaagccattgactcctgcgcttatttcggagcttctagccatgccttgtctgtttgccagccgtaatcagaacttcaagacagccttgccatactaccctgctttcgtagggaaactgacagaaatcgtctgtcagggaaaaacgatcaaatttaaatttattacatgcggtcaattttaccaacaatttattaacgaaaacatccatacatttagccttctttctaccagtgtcagaaatcagctcgatgaagagcactggtgcattcgacagggtaacctgctccagattgctgcaaatgtgggaatcgaaatcagataaggagaatcctatggaagaattaaaagataaatggtttaacattgaagatattgccgagtacctgagcatcacgcaggatacagcccggacatgggtaagagatggaaagctgcccgcttataaagtgggaaagcgatataaattcaagctcagcgaagtggatgaatgggtacgagagggaaaaataaaggagtagaacggatatgaaaaaggtacgagtacacatcacaaaaacaaccgtcaatgccccgacctacagtaacgtgacctttgaaccgacattgatcaatttcttttatggaaaaaatggaaccggaaaatctacgcttgcccgttctttcaaagatgggaacgctgcactgacatgggatggtcagccattcccggaagaacgtgttcttgtttacaatgaggattttatccgcaaaaatgttcagagttatggtaacattccaggtgtctttactatctcggaagtcaatgcacagaagaaaaaggaagctgacgaaaaggccatcgagaaaaagtccgtagatgacactattgtcgcaaggggaaaagaggcggtagcaaagcaaggtgaattggataaactgcatggagattatgtcgaagccatttggggagccaccaaggaatttcgggataaattccctcttgcattagcctatctgcgcgacaaaaagaaatttgctgataagattcaaagcatgactcctaaagcggctaaaatagatccagacgctccatcttttgatgaagaagatatgagcatgtccgcaggcgaaaatcattccgaagaagaaccgatgattgaaattgcagatatagaggcgctttatcaaaccattcatggtgagaatcagccaaactatagtgcctatcatttgctgtcatccacttctcttcctgcatctgatcttttgtccacaccgattctcagccgtagtgatacagagttcgcgcgattcatacgtgcacttggcaacctagactggatcactcagggacatacgaagtatcactcttctgaagggaagtgtccttactgtcagcaaactattccagacacttttgaggatgaccttgctgcctgctatgatgccgaatacaaagctgatctgaaaaaactgtcttcgtttgttcaacaatataaagacgcattaaacaatgtatacaaaacagctcatacaaacgaagggaacaattttccttcgccattgcaggctgattacaaggctgctttcgaactgtttatggagaaggcacgtgccaatgtgaccctgttggagcagaaatcagccagcccagcagatgtgatagtattggaagatttgtctgaccttcttgtcgagctcgaccaaatttcacgcaagatcaacgaagatattaaagccagaaatgctgttctcgctgatattccgactcaaaagaaaaaatgcaccaatatggcatggtctgcaatcgttcagcggactcaggtactcacaaataccttccgacgcaacacagattctgtgatttcagccatgaattatatcaaggctgaaagcaacaaattgaaggcaaaatcccaggctcttagcaaagagattgcaaaattgaacagcgaaactgtcaacaccactaaaacgatgcaagatattaaccgtgccatcgccagtgccggttttaaagggtttgaacttcaggaaaagcctggtgccaaatatgtctatcagctggtaagaaatcagaacggcaagaagattgttgttgataaggatctcagtgaaggcgaacggcattttattgctttcctttacttctatcacatggtaatgggcagtcagtccgatgctggaaaagtcgaggataagattgttgtaatcgatgatcctgtttcctctatggacagtggctctctttttgtggttgcttccctcactcgtgaaatgattgctgtctgctataacaattatgcacttcatgaagaaattgtggatgaccatattcgacagttcttctgcatgacacacaacccttacttcttccgggagatttcttataaccgcctgcctgattacgaatgtgtgtccttctttgagataaagaaagacacacaaaatcagaccagcattacagaatgccaagatgaagacaccatagccggtggcggtcttatcaatcgttctccagtaagaaatacttacgataccctttggcatgaatacgccacaaccagtgacccggatactctcctgattgtcatccgccagattcttgaatactacttcatccagatggtcggctatcaaaatggaaatctacgttcagacttactggataaaaatgaaagggaattcgtaagaattttggatgatggtagcgaagatcggtctgactatgtttctgctgccgccatgattgccatgctgaatgttggtgctactggcttcaatgacggactatactatgactcatctgccaccagtgttgaacagctgcgttctgtctttgaacggatctttaaggtcatgcatcaggagcagcattttaatatgatgactcgaaaagcccgataaacaaagaaaccgacctggtggtcggtagcgaggtaattatatgctgtttccagtagattttttgaacaaaatgcagtggctggtggatgaactttgagaattggaaggggatttgatgacttgaactactacttttgcgacgcctgccgctactgcttctctgctgagaagctgccagaccgttgtcctgactgtggagcggtagcacacgatgataaaaaggcagtacgaccggcgagtaaaatggaaatagaggaactgctcagaatacgaaaagaagataaggagaacacaaaatgaaaacacataagtattggtcactcggagcacttgcctgtatggcaggatgcttctacaccggctgcaagaaactgatgaaggctcacaagtatttcgcttgtggctctctgatctgcatgggcatggcaatctactctggtcataaaattgcaccgaagaagaaagctgaaaagcctgaataataagaacacacgccctcgccgtaacaagcgagggcttttttgaactctaggagttcattttatttctgttacataccgtatacttccgtcataagccgaattccaactttcaatccttcctcaaaagcagtcttctcccatgcacagcacaccgttccctgccggtccatgatcttctcccagagtggaatcttatctccgacgtagtcatctacgagcctatccattccgtccaagctgcgcagccactcttccagttccttttctttggcctttgccgctttcccagcaactgtgtttttctctactggattattctccgtgtaatgttcgtagatcagatccagcagattctccactggcgggtaatactccggctcagttttcttcaaatactcctccagcatcttcttcaatttttctataatgctaccatccttcccaactgagattcatttcctcagttacggcacatattaccgtagacttttgcacatagcaacctattttttgcggtctttcaaatgccccatcttctccttcacttcatccggcacatcgatcaacctgaaccgatagaacatcccgtaaatataagtcacgccccggatatcacctagagctttcgggcggtttaccacttcccctttaatatttcccagagccaaaacaatagaactccacgccagacttttactcttctcccgtctgtcgatccacagttctttcgtgtactcgccgttcctgcctttccgcacctcataagtaaatggcaatccagagtaagttttgaatttcacgcccgcataggccacaactacgccccagaagttttcttctgtcggatgagccctccaccgtttcatcgctctgtatctccgttgccgctctgctccgacactgatcttttctttttctgtactttggaagtacacgcctttctgatatggcagatacgaggtaacggaggctttggagagttgaagagtatttgcggttgagaggatggcatctttatagttctgtgtttttcggtactcttcaaaggtatcctgtaccttctccgccacttccgattcatacacaccagccgtgatgagcaacttccgtaccttgatggggttgagattcagagcatcagcgatggcctgcaaggacatctcagaattataaagtgccacagcactttccatctgctctttcaggttcttccctgcatcatactccggcttcagctttttccggccaccgccgggcttccggggtttatatgctcttttctctcccataattattcgtgcagctccagcggcagaccatccgggtcatgaaagaaagtcatcttcttgccggtataatcatccacacggattggctcacattcaattccgaccgctgccagttctttcaccgtctgctccacgctatcaacgcagaacgcaaggtgacgtaggccacaggcctctgggcggttcacacgcttcggcggattttcctcagcgaaaatctccagctctgtgtattcattgacacgcagatccagtttccagtccttacgctccgggcggtagttttctctgatgacagaaaaacccagcttgttcacatagaaatcctttgcagcttcgtagtcagatacgatgattgcgatatggtgtatttttgataaattcatttttctcacgctccatttcttttatttccgttacaaactatacagcaaccttcaaaaaataccgtgtgaactcctggagttcagtttgtccacacggctgatcttatttcagcttttccagaatctcatccgcgctcatcccgctggctaataatttcttaaccacactctcggcttctgctttctttgcttcttctgcagccttagcatctgcctttgccttcttcgcttctagggatgccgcttctttttcggccttcttaagagtagtcttcttctccttcaaatcagccttcaaagtgtcaatgttggcggtgatggatgcaatttcagcagtcagagaggcaatagtttcctgcttctccgcgatctgagatgcgtagtcgttattggttttgggacggtttttgctacctttcgttctgggcataggtgataacctctttccttttatagtggtttaagtatagcactgtgtagatatatatgatacatcaatcatatatgcctttgccaatacaacacttcttaaatttctttccgctaccacaaggacacagctcatttctttctggttttcttaccacaggctgtcctgcatctcttttcaatttatccatatatctttttaattctggtcgattttcgtaatactgtcgtgatctggggtctgctaaatccattgcttcttgtggtacactaaagcgaagctctatattatcagaaatatgtaacatattgctgagacacaatgcatatgcatttgcatcaatttctacttcttgagacagattaacagcctgtgtacttccgccttcgtttcttgtatagtttataaaaccatttttccatgaaacaatggtacttatatcttcatgtacagtattattgctatccaacaacgcaatttcatagtgctgatgtaagtgtcgcagctcatgaaaaatgaagaactctatatcaaccctatgattttcccatctatcttgtcctgtaaaccacggcttattaaaatacaatttatttccgcatccctctgcggcattgtccattgttttgaatctgtcagatgggcagtcttcaaaataggattcaataggttcgggtaatgtcatgaaacttcttgcataattaatacaattctgaacaagttcca
